(19) United States
(12) Patent Application Publication
(10) Pub. No.: US 2013/0007927 A1
(43) Pub. Date: Jan. 3, 2013

(54) NOVEL CENTROMERES AND METHODS OF USING THE SAME

(75) Inventors: Gregory P. Copenhaver, Chapel Hill, NC (US); Song Luo, Chicago, IL (US); Jennifer M. Mach, Chicago, IL (US); Daphne Preuss, Chicago, IL (US); Rolando Ramirez, Chicago, IL (US)

(73) Assignee: CHROMATIN, INC., Chicago, IL (US)

(21) Appl. No.: 13/522,891

(22) PCT Filed: Jan. 21, 2011
(86) PCT No.: PCT/US11/22168

§ 371 Date: Sep. 25, 2012

Related U.S. Application Data
(60) Provisional application No. 61/297,636, filed on Jan. 22, 2010.

(51) Int. Cl. C12N 15/11; A01H 5/00; C12Q 1/68; C40B 30/04; C12N 15/82; C12N 5/10

(52) U.S. Cl. 800/314; 536/23.1; 435/320.1; 435/419; 435/6.11; 506/9

(57) ABSTRACT

The invention is generally related to compositions and methods related to novel centromere sequences identified in cotton, and resulting recombinant DNA constructs, such as minichromosomes, made using such sequences. Minichromosomes with novel compositions and structures can be used, for example, to transform plant cells that are in turn used to generate minichromosome-harboring plants. The invention is directed to products of such plants, including oil and textiles. The invention is also directed to novel methods for identifying centromere sequences.

### CROSS REFERENCE TO RELATED APPLICATION

[0001] This application claims priority to US Provisional patent application by G. Copenhaver, et al., U.S. Provisional Patent Application Ser. No. 61/297,636, titled, “PLANTS MODIFIED WITH MINICHROMOSOMES,” filed Jan. 22, 2010, which is incorporated by reference herein in its entirety. This application also claims priority to US Provisional patent application by G. Copenhaver, et al., U.S. Provisional Patent Application Ser. No. 61/435,202, file Jan. 21, 2011, which is incorporated by reference herein in its entirety.

### FIELD OF THE INVENTION

[0002] The present invention relates to methods for identifying centromeric sequences that are useful, for example, in constructing artificial chromosomes, and cells and organisms comprising such artificial chromosomes as these methods relate to cotton. The present invention also discloses centromeric sequences useful, for example, in constructing artificial chromosomes for use in cotton.

### GOVERNMENT SUPPORT

[0003] Not applicable.

### COMPACT DISC FOR SEQUENCE LISTINGS AND TABLES

[0004] Not applicable

### INCORPORATION BY REFERENCE OF AN ELECTRONICALLY-SUBMITTED SEQUENCE LISTING

[0005] This application incorporates by reference the electronically-submitted sequence listing titled, “018WON1_sequence_listing_ST25—FINAL,” an ASCII-compliant file, created 21 Jan. 2011, and is 593 kB and submitted concurrently with this application.

### BACKGROUND OF THE INVENTION

[0006] Agricultural crops have the potential to meet escalating global demands for affordable and sustainable production of food, fuels, fibers, therapeutics, and biomaterials (Herrera, 2004). While integrative plant transformation techniques can often meet these needs by safely introducing novel genes into plant chromosomes, they have limited efficiency and can disrupt the host genome. Typically, biological delivery of DNA carried on an Agrobacterium T-DNA plasmid, or biolistic delivery of small DNA-coated particles is used to transfer and integrate desired genes into a host plant chromosome (Lorence and Verpoorte 2004). Integration at random sites results in unpredictable transgene expression due to position effect variegation, variable copy number from tandem integrations, and frequent loss of gene integrity as a result of unpredictable breakage and end joining (Birch, 1997; Lorence and Verpoorte, 2004). Transgene integration can also result in genetic linkage of the introduced genes to portions of the genome that encode loci that confer undesired phenotypes, adding complexity when the transgenic locus is introgressed into other varieties (Walker et al., 2002; Yin et al., 2004). Recent advances in gene integration technologies have aimed to surmount some of these difficulties. For example, zinc finger-mediated homologous recombination or site-specific recombination could eliminate the unpredictable expression that results from random insertion into the plant genome (Gilbertson, 2003; Kumar et al., 2006). In addition, combining binary T-DNA elements with bacterial artificial chromosome (BAC) technology to produce BiBACs has the potential to introduce larger DNA fragments into the host genome (Hamilton et al., 1996; He et al., 2003). In contrast to these systems, minichromosomes (MCs) remain separate (autonomous) from the host chromosomes, and thus provide an alternative approach with important benefits. Indeed, although precise integration into host chromosomes has long been a routine technique in Saccharomyces cerevisiae, the facile properties of autonomous vectors often make them a preferred choice for numerous applications, including commercial-scale protein production.

[0007] The first eukaryotic MCMCs used a simple centromere (CEN) sequence from the budding yeast S. cerevisiae, incorporated into versatile circular CEN and linear yeast artificial chromosome (YAC) vectors (Burke et al., 1987; Clarke and Carbon, 1980). These yeast vectors were used to define a 125-bp DNA fragment sufficient for mitotic and meiotic centromere function (Cottarel, Shero et al. 1989). While circular CEN vectors are most useful for carrying smaller DNA fragments, YAC vectors can carry megabase quantities of DNA and are convenient for manipulating large fragments of DNA (Larin et al., 1991). Similarly, with carrying capacities of hundreds of kb, human artificial chromosomes (HACs) provide advantages over other in vitro-assembled vectors used in human cell transfection (Kuroiwa et al., 2000). HACs containing tandem repeats of a 171-bp alpha satellite sequence can be maintained either as circular or linear, telomere-containing, episomes (Ebersole et al., 2000; Harrington et al., 1997; (keno et al., 1998; Schueler et al., 2001; Tsuduki et al., 2006).

[0008] DNA sequences that can form stable MCs are able to recapitulate centromere functions de novo by recruiting essential DNA binding proteins and epigenetic modifications. In human cells, different repetitive DNA (satellite) arrays vary in their ability to efficiently form HACs, based on their monomer sequence, chromosomal origin, array length, higher-order structure, and even vector composition (Grimes et al., 2002; Mejia et al., 2002; Ohzeki et al., 2002; Okamoto et al., 2007). These DNA sequences recruit centromere binding protein A (CENP-A), which substitutes for histone H3 to form centromeric nucleosomes; this protein marks active centromeres in S. cerevisiae (Cse4p), Schizosaccharomyces pombe (Cnp1), Drosophila melanogaster (Cid), Arabidopsis thaliana (HTR12), Zea mays (CENH3), and Homo sapiens (CENP-A) (Malik and Henikoff, 2001; Meluh et al., 1998; Palmer et al., 1987; Takahashi et al., 2000; Talbert et al., 2002; Zhong et al., 2002). CENP-A complexes are maintained through mitosis and meiosis (Schatten et al., 1988), resulting in an epigenetic mark that is important in perpetuating centromere activity. Evidence for this role in centromere maintenance comes from human neocentromeres (Lo et al., 2001), where, at a very low frequency, aberrant ectopic centromeres are nucleated in regions that lack satellite DNA. Once formed, these neocentromeres are efficiently perpetuated. The ability to form centromeres on naked DNA also depends on cell type in mammalian systems; indeed, HAC formation has been most commonly demonstrated in HT1080 fibrosarcoma cells. Yet once established, HACs can be transferred to other mammalian cell types, where they are stably maintained (Suzuki et al., 2006).

[0009] Maize centromeres contain repetitive sequences that are similar to those found in mammalian centromeres; for example, analogous to the tandem arrays of alpha satellite found in human centromeres, large tandem arrays of the 156-bp maize CentC satellite bind to CENP-A (Ananiev et al., 1998; Nagaki et al., 2003; Zhong et al., 2002). These satellite arrays are often interrupted by CRM, a centromere-specific retroelement that also binds CENP-A (Zhong et al., 2002). Some maize varieties also have supernumerary B chromosomes with a distinct centromere satellite sequence, ZmBs (Alfenito and Birchler, 1993; Jin et al., 2005). These B chromosomes lack essential genes, and thus have been particularly useful for discerning the relationship between centromere structure and meiotic transmission (Kaszas et al., 2002; Kato et al., 2005; Phelps-Durr and Birchler, 2004). A series of deletion derivatives of natural B chromosomes, derived from an A-B translocation event, showed a strong dependence on centromere size—the smallest functional derivative contained a 110-kb centromere and resulted in a meiotic transmission rate of 5%, yet showed a high stability in mitosis (Phelps-Durr and Birchler 2004). More recently, telomere-mediated chromosomal truncation was used to generate deletion derivatives from both A and B maize chromosomes [40]. Transgenes carried on these derivative chromosomes (or “engineered MCs”) were expressed and meiotic inheritance ranged from 12% to 39% (Yu et al., 2007). While this telomere-truncation approach can deliver both transgenes and sequences that promote site-directed integration, its utility for commercial applications can be limited—most commercial maize hybrids lack B chromosomes.

[0010] Carlson et al. (2007) have described autonomous MCs that do not rely on alteration of endogenous chromosomes (Carlson, Rudgers et al. 2007). Carlson et al. constructed plasmids carrying maize centromeric repeats, delivered purified constructs to embryogenic maize tissue, and assessed their ability to promote the formation of maize minichromosomes (MMCs). MMC1 was characterized in detail; this CentC-based construct contained 19 kb of centromeric DNA and conferred efficient mitotic and meiotic inheritance through at least four generations when introduced into plant cells.

[0011] Making artificial chromosomes often requires centromeric sequences specific to a target organism, as sequences from a related organism sometimes do not work efficiently in establishing centromere function (Kitada et al., 1997; Pribylova et al., 2007) Identification of centromeres has been pursued in several organisms by searching for repetitive DNA or methylated DNA followed by labeling studies to determine whether the identified sequences hybridize to the centromere region of chromosomes, and/or functional studies to determine whether the identified sequence(s) function as centromeres (see, for example, U.S. Pat. No. 7,456,013, WO 08/112,972).

### SUMMARY OF THE INVENTION

[0012] In a first aspect, the invention is directed to cotton plants, such as, for example, Gossypium hirsutum, Gossypium davidsonii, Gossypium klotzschianum, Gossypium raimondii, Gossypium anomalum, and Gossypium somalense plants, or cotton plants having, for example, B, D, and E2 genome types, comprising a minichromosome, and methods pertaining to such cotton plants, wherein the minichromosome has a transmission efficiency during mitotic or meiotic division of at least 50%, 90%, 95% and 99%, or a transmission efficiency during meiosis of at least 25%, 50%, 70%, 80%, 85%, 90%, 95%, or 99%. The minichromosome can be anywhere from 10 kb to 1000 kb, including 100 and 200 kb. The minichromosome can also comprise a site for site-specific recombination, a centromere nucleic acid insert derived from a cotton plant, where that centromere nucleic acid can be obtained directly from cotton genomic DNA or artificially synthesized. If the minichromosome is derived from a donor clone or centromere clone, it can have substitutions, deletions, insertions, duplications, or arrangements of one or more nucleotides in the minichromosome compared to the nucleotide sequence of the donor clone or centromere clone and retains a minichromosome function. The minichromosome can be obtained by passage of the minichromosome through one or more hosts, such as virus, bacteria, yeast, plant, prokaryotes, or eukaryotes. The minichromosome can further comprise 1, 2, 5, 10 or more exogenous nucleic acids. These exogenous nucleic acids can be operably linked to a heterologous regulatory sequence that functions in plant cells, such as a plant, a non-plant, an insect or a yeast regulatory sequence. Non-plant regulatory sequences can comprise polynucleotides such as SEQ ID NOS:1-20, or a functional fragment thereof. Exogenous nucleic acids carried on minichromosomes can confer resistance to an herbicide (e.g., phosphinothricin or glyphosate), an insect, a disease, or to stress. Examples of such nucleic acids are those that encode phosphinothricin acetyltransferase, glyphosate acetyltransferase or a mutant enoylpyruvyl shikimate phosphate (EPSP) synthase. Other examples include those exogenous nucleic acids that encode a Bacillus thuringiensis or Bacillus cereus toxin gene. An exogenous nucleic acid can also confer resistance to drought, heat, chilling, freezing, excessive moisture, ultraviolet light, ionizing radiation, mechanical stress, toxins, pollution, or salt stress; or, it can confer resistance to a virus, bacteria, fungi or nematode. Since minichromosomes can carry a plurality of exogenous nucleic acids, minichromosome can confer multiple functions simultaneously, such as herbicide and insect resistance.

[0013] Examples of exogenous nucleic acids include: a nitrogen fixation gene, a plant stress-induced gene, a nutrient utilization gene, a gene that affects plant pigmentation, a gene that encodes an antisense or ribozyme molecule, a gene encoding a secretable antigen, a toxin gene, a receptor gene, a ligand gene, a seed storage gene, a hormone gene, an enzyme gene, an interleukin gene, a clotting factor gene, a cytokine gene, an antibody gene, a growth factor gene, a transcription factor gene, a transcriptional repressor gene, a DNA-binding protein gene, a recombination gene, a DNA replication gene, a programmed cell death gene, a kinase gene, a phosphatase gene, a G protein gene, a cyclin gene, a cell cycle control gene, a gene involved in transcription, a gene involved in translation, a gene involved in RNA processing, a gene involved in RNAi, an organellar gene, a intracellular trafficking gene, an integral membrane protein gene, a transporter gene, a membrane channel protein gene, a cell wall gene, a gene involved in protein processing, a gene involved in protein modification, a gene involved in protein degradation, a gene involved in metabolism, a gene involved in biosynthesis, a gene involved in assimilation of nitrogen or other elements or nutrients, a gene involved in controlling carbon flux, gene involved in respiration, a gene involved in photosynthesis, a gene involved in light sensing, a gene involved in organogenesis, a gene involved in embryogenesis, a gene involved in differentiation, a gene involved in meiotic drive, a gene involved in self incompatibility, a gene involved in development, a gene involved in nutrient, metabolite or mineral transport, a gene involved in nutrient, metabolite or mineral storage, a calcium-binding protein gene, or a lipid-binding protein gene.

[0014] Additional examples of exogenous nucleic acids include those that encode an enzyme involved in or for: metabolizing biochemical wastes for use in bioremediation, modifying pathways that produce secondary plant metabolites, produces a pharmaceutical, improves changes the nutritional content of a plant, vitamin synthesis, carbohydrate, polysaccharide or starch synthesis, mineral accumulation or availability, a gene that encodes a phytase, fatty acid, fat or oil synthesis, synthesis of chemicals or plastics, synthesis of a fuel and synthesis of a fragrance, synthesis of a flavor, synthesis of a pigment or dye, synthesis of a hydrocarbon, synthesis of a structural or fibrous compound, synthesis of a food additive, synthesis of a chemical insecticide, synthesis of an insect repellent, or a gene controlling carbon flux in a plant.

[0015] The minichromosome can comprise a centromere comprising n copies of a repeated nucleotide sequence, wherein n is less than 1000, such as 5, 15, and 50. The minichromosome can further comprise a telomere. Minichromosomes can be circular or linear.

[0016] The cotton plant parts or cotton plants comprising a minichromosome also comprise an aspect of the invention, such as a root, cutting, stem, stalk, fiber (lint), square, boll, flower, leaf, epidermis, vascular tissue, organ, protoplast, crown, callus culture, petiole, petal, sepal, stamen, stigma, style, bud, meristem, cambium, cortex, pith, sheath, or embryo. In addition, plant parts, such as a meiocyte or gamete or ovule or pollen or endosperm are also included, as are propagules and cells of such cotton plants. The invention is also directed to materials made from cotton from a cotton plant harboring a minichromosome, such as textiles, fibers, yarn, etc.

[0017] The invention also includes progeny of such cotton plants comprising a minichromosome, including that progeny that results from self-breeding, cross-breeding, apomyxis, or clonal propagation. These progeny can comprise a minichromosome descended from a parental minichromosome that contained a centromere less than 1, 2, 3, 4, 5, 6, 7, 8, 9, 10, 25, 50, 75, 100, or 150 kb.

[0018] In another aspect, the invention is directed to methods of using such cottonplants comprising a minichromosome. These methods include using the cotton plants to produce a food or feed product. Or to produce a recombinant protein that can, for example, also be isolated from such cotton plants. The method can further comprise the steps of harvesting the cotton plant and isolating the recombinant protein from the cotton plant. Examples of recombinant proteins include pharmaceutical proteins. Such cotton plants can also be used in methods to produce a chemical product that can be isolated from the harvested cotton plant. An example of a chemical product is a pharmaceutical product and oils

[0019] In another aspect, the invention is directed to isolated polynucleotides comprising a polynucleotide sequence having at least 70%, 79%, 80%, 90%, 95%, and 99% sequence identity with SEQ ID NO:94. Furthermore, this polynucleotide can confer the ability to the polynucleotide or to any polynucleotide to be transmitted through mitosis or meiosis in a plant cell with a transmission efficiency from 1% to greater than 50%. The plant cell can be, for example, a cotton cell. The polynucleotide can consist of a nucleic acid sequence having at least 70% sequence identity with a nucleic acid selected from the group consisting of SEQ ID NOs:95, 96 and 97. Other examples of centromere nucleic acids include those having at least 70%, 79%, 80%, 90%, 95%, and 99% sequence identity, include SEQ ID NOS: 113, 116, 119 and 122, or the sequences themselves.

[0020] In another aspect, the invention is directed to isolated polynucleotides comprising a sequence having at least 70% sequence identity to a a nucleic acid sequence selected from the group consisting of SEQ ID NOS:95, 96 and 97. SEQ ID NO:97 can further comprise an insert of 1 bp to 4 kb, such as a sequence of SEQ ID NO:96 or a retrotransposon-like element, and additionally, can confer the ability to the polynucleotide to be transmitted through mitosis or meiosis in a plant cell (such as a cotton plant cell) with a transmission efficiency of at least 50%, 90%, 95% and 99%, or a transmission efficiency during meiosis of at least 25%, 50%, 70%, 80%, 85%, 90%, 95%, or 99%.

[0021] In another aspect, the invention is directed to recombinant DNA constructs, such as minichromosomes, comprising polynucleotides comprising a sequence having at least 70% sequence identity to a a nucleic acid sequence selected from the group consisting of SEQ ID NOS:95, 96 and 97. SEQ ID NO:97 can further comprise an insert of 1 bp to 3, 999 bp, such as a sequence of SEQ ID NO:96 or a retrotransposon-like element, and additionally, can confer the ability to the polynucleotide to be transmitted through mitosis or meiosis in a plant cell (such as a cotton plant cell) with a transmission efficiency of at least 50%, 90%, 95% and 99%, or a transmission efficiency during meiosis of at least 25%, 50%, 70%, 80%, 85%, 90%, 95%, or 99%. The invention is further directed to cells, such as plant cells (e.g., a cotton plant cell); and plants, such as crop plants (e.g., cotton) comprising such minichromosomes.

[0022] The minichromosome can also comprise a site for site-specific recombination, a centromere nucleic acid insert derived from a cotton plant, where that centromere nucleic acid can be obtained directly from cotton genomic DNA or artificially synthesized. If the minichromosome is derived from a donor clone or centromere clone, it can have substitutions, deletions, insertions, duplications, or arrangements of one or more nucleotides in the minichromosome compared to the nucleotide sequence of the donor clone or centromere clone and retains a minichromosome function. The minichromosome can be obtained by passage of the minichromosome through one or more hosts, such as virus, bacteria, yeast, plant, prokaryotes, or eukaryotes. The minichromosome can further comprise 1, 2, 5, 10 or more exogenous nucleic acids. These exogenous nucleic acids can be operably linked to a he3tyerologous regulatory sequence that functions in plant cells, such as a plant, a non-plant, an insect or a yeast regulatory sequence. Non-plant regulatory sequences can comprise SEQ ID NOS:1-20, or a functional fragment thereof. Exogenouse nucleic acids carried on minichromosomes can confer resistance to a herbicide (e.g., phosphinothricin or glyphosate), an insect, a disease, or to stress. Examples of such nucleic acids are those that encode phosphinothricin acetyltransferase, glyphosate acetyltransferase or a mutant enoylpyruvyl shikimate phosphate (EPSP) synthase. Other examples include those exogenous nucleic acids that encode a Bacillus thuringiensis or Bacillus cereus toxin gene. An exogenous nucleic acid can also confer resistance to drought, heat, chilling, freezing, excessive moisture, ultraviolet light, ionizing radiation, mechanical stress, toxins, pollution, or salt stress; or, it can confer resistance to a virus, bacteria, fungi or nematode. Since minichromosomes can carry a plurality of exogenous nucleic acids, minichromosome can confer multiple functions simultaneously, such as herbicide and insect resistance.

[0023] Examples of exogenous nucleic acids include: a nitrogen fixation gene, a plant stress-induced gene, a nutrient utilization gene, a gene that affects plant pigmentation, a gene that encodes an antisense or ribozyme molecule, a gene encoding a secretable antigen, a toxin gene, a receptor gene, a ligand gene, a seed storage gene, a hormone gene, an enzyme gene, an interleukin gene, a clotting factor gene, a cytokine gene, an antibody gene, a growth factor gene, a transcription factor gene, a transcriptional repressor gene, a DNA-binding protein gene, a recombination gene, a DNA replication gene, a programmed cell death gene, a kinase gene, a phosphatase gene, a G protein gene, a cyclin gene, a cell cycle control gene, a gene involved in transcription, a gene involved in translation, a gene involved in RNA processing, a gene involved in RNAi, an organellar gene, a intracellular trafficking gene, an integral membrane protein gene, a transporter gene, a membrane channel protein gene, a cell wall gene, a gene involved in protein processing, a gene involved in protein modification, a gene involved in protein degradation, a gene involved in metabolism, a gene involved in biosynthesis, a gene involved in assimilation of nitrogen or other elements or nutrients, a gene involved in controlling carbon flux, gene involved in respiration, a gene involved in photosynthesis, a gene involved in light sensing, a gene involved in organogenesis, a gene involved in embryogenesis, a gene involved in differentiation, a gene involved in meiotic drive, a gene involved in self incompatibility, a gene involved in development, a gene involved in nutrient, metabolite or mineral transport, a gene involved in nutrient, metabolite or mineral storage, a calcium-binding protein gene, or a lipid-binding protein gene.

[0024] Additional examples of exogenous nucleic acids include those that encode an enzyme involved in or for: metabolizing biochemical wastes for use in bioremediation, modifying pathways that produce secondary plant metabolites, produces a pharmaceutical, improves changes the nutritional content of a plant, vitamin synthesis, carbohydrate, polysaccharide or starch synthesis, mineral accumulation or availability, a gene that encodes a phytase, fatty acid, fat or oil synthesis, synthesis of chemicals or plastics, synthesis of a fuel and synthesis of a fragrance, synthesis of a flavor, synthesis of a pigment or dye, synthesis of a hydrocarbon, synthesis of a structural or fibrous compound, synthesis of a food additive, synthesis of a chemical insecticide, synthesis of an insect repellent, or a gene controlling carbon flux in a plant.

[0025] In another aspect, the invention is directed to minichromosomes comprising a nucleic acid sequence of SEQ ID NO:94, which can further comprise an insertion of 1 nucleotide to 4 kb. The invention is further directed to cells, such as plant cells (e.g., a cotton plant cell); and plants, such as crop plants (e.g., cotton) comprising such minichromosomes.

[0026] In another aspect, the invention is directed to minichromosomes comprising a polynucleotide comprising two copies of a nucleic acid sequence of SEQ ID NO:96, wherein a first copy of SEQ ID NO:96 is located 5′ of SEQ ID NO:95, and the second copy of SEQ ID NO:96 is located 3′ of SEQ ID NO:95. SEQ ID NO:95 can further comprise an insert of 1 nucleotide to 4 kb. The invention is further directed to cells, such as plant cells (e.g., a cotton plant cell); and plants, such as crop plants (e.g., cotton) comprising such minichromosomes.

[0027] In another aspect, the invention is directed to minichromosomes comprising a polynucleotide comprising of SEQ ID NO:97. SEQ ID NO:97 can further comprise an insert of 1 nucleotide to 4 kb. The invention is further directed to cells, such as plant cells (e.g., a cotton plant cell); and plants, such as crop plants (e.g., cotton) comprising such minichromosomes.

[0028] In yet another aspect, the invention is directed to DNA constructs that comprise a first nucleic acid sequence having at least 70% sequence identity to a nucleic acid sequence selected from the group consisting of SEQ ID NO:94, SEQ ID NO:95 and SEQ ID NO:97. Such DNA constructs can comprise a first nucleic acid sequence having at least 70% sequence identity to SEQ ID NO:95, and further comprises at least two copies of a second nucleic acid sequence having at least 70% sequence identity to SEQ ID NO:96, wherein a first copy of SEQ ID NO:96 is located 5′ of SEQ ID NO:95, and the second copy of SEQ ID NO:96 is located 3′ of SEQ ID NO:95. The first nucleic acid sequence further comprises an insertion of 1 nt to 4 kb. The two copies of SEQ ID NO:96 may be 90% or more identical to each other, or less than 90% identical. The invention also comprises minichromosomes that comprise such DNA constructs, as well as plants comprising such minichromosomes.

[0029] In another aspect, the invention is directed to polynucleotides comprising a structure comprising a core sequence flanked by two retroelement-related sequences, wherein the polynucleotide confers an ability to the polynucleotide to be transmitted through mitosis or meiosis in a plant cell with a transmission efficiency greater than 50%. The retroelement-related sequences in such structures can be at least 90% identical or are less than 90% identical. These retroelement-related sequences can have at least 70%, 80%, 90%, 95% sequence identity with SEQ ID NO:96, or consist of SEQ ID NO:96. The core sequence can have at least 70%, 80%, 90%, 95% sequence identity with SEQ ID NO:95. Mitotic or meiotic efficiency can be measured in a plant cells, such as cotton plant cells.

[0030] In all minichromosome compositions of the invention, the invention also comprises plant cells, plant parts, plants and products derived from such plants that harbor such minichromosomes. In all aspects of the invention, cotton cells, cotton plants, and centromere sequences can be Gossypium hirsutum, Gossypium davidsonii, Gossypium klotzschianum, Gossypium raimondii, Gossypium anomalum, and Gossypium somalense plants, cotton plant cells, and centromere sequences; or plants, cotton plant cells, or centromere sequences having, for example, B, D, and E2 genome types.

### BRIEF DESCRIPTION OF SEVERAL VIEWS OF THE DRAWINGS

[0031] FIGS. 1A-1C show the localization of probes prepared to identify the 194 tandem repeat represented by SEQ ID NO:90 (FIG. 1A), CrGh1 (FIG. 1B), and the overlay of the two signals (FIG. 1C) in mitotic metaphase G. hirsutum chromosomes. The chromosomes are counterstained with DAPI.

[0032] FIG. 2 shows the localization of probes in FISH experiments on mitotic metaphase G. hirsutum chromosomes prepare to identify the tandem repeats represented by SEQ ID NO:90/CrGh1 1 (194 bp) and SEQ ID NO:91 2 (210 bp). The chromosomes are counterstained with DAPI.

[0033] FIGS. 3A-3B show FISH experiments on mitotic metaphase G. hirsutum chromosomes with a probe that is not specific for cotton centromere.

[0034] FIGS. 4A-4I show a diagrammatic representation of a cotton centromere (FIG. 4A), and staining with probes specific for different parts of the cotton centromere in FISH experiments on mitotic metaphase G. hirsutum chromosomes (FIGS. 4B-41).

[0035] FIGS. 5A-5I show the structure of the novel cotton centromere and FISH experiments on mitotic metaphase G. hirsutum chromosomes using probes specific to cotton centromeres.

[0036] FIGS. 6A-GH show the results of FISH experiments using SEQ ID NO:95- and SEQ ID NO:96-specific probes in G. hirsutum chromosomes.

[0037] FIGS. 7A-7D show the results of FISH experiments using a BAC harboring a cotton centromere, BAC 53H10, and a probe specific for SEQ ID NO:96.

### DETAILED DESCRIPTION OF THE INVENTION

### I. Introduction

[0038] The invention is based on the surprising result that the centromeres in cotton are structurally distinct from those observed in other plants. Typically plant centromeres are comprised of tandem arrays of repetitive satellite sequences (e.g., the 180 bp repeat in Arabidopsis; CentC in maize; CentO in rice) that are sometimes interspersed with centromere-specific retrotransposon sequences (e.g., CRM in maize and CRR in rice) (Ma and Jackson 2006); Ananiev et al., 1998; Nagaki et al., 2003; Zhong et al., 2002; (Cheng, Dong et al. 2002). Instead cotton centromeres lack long tandem arrays of satellite sequence and arecomprised of retrotransposon-like element structures that include a core sequence flanked by two identical sequences. This surprising observation allows for the production of modified plants, especially cotton plants, containing functional, stable, autonomous MCs. A diagrammatic rendering of the structure of the novel centromeric sequence is shown in FIG. 5A. FIG. 5A shows that the novel cotton centromeric structure has a core (CenCORE; designated as an oval in the drawing) that is flanked by CenFR sequences (designated by arrows). This structure is reminiscient of other centromeric structures found in some in higher, non-plant eukaryotes, such as Drosophila melanogaster. (Sun, Wahlstrom et al. 1997). To date, this structure has never been observed in any plant to function as a centromere.

### II. Definitions

[0039] “Adchromosomal” plant or plant part means a plant or plant part that contains functional, stable and autonomous MCs. Adchromosomal plants or plant parts can be chimeric or not chimeric (chimeric meaning that MCs are only in certain portions of the plant, and are not uniformly distributed throughout the plant). An adchromosomal plant cell contains at least one functional, stable and autonomous MC.

[0040] “Autonomous” means that when delivered to plant cells, at least some MCs are transmitted through mitotic division to daughter cells and are episomal in the daughter plant cells, i.e., are not chromosomally integrated in the daughter plant cells. Daughter plant cells that contain autonomous MCs can be selected for further propagation using, for example, selectable or screenable markers. During the introduction into a cell of a MC, or during subsequent stages of the cell cycle, there may be chromosomal integration of some portion or all of the DNA derived from a MC in some cells. The MC is still characterized as autonomous despite the occurrence of such events if a plant, plant part or plant tissue can be regenerated that contains episomal descendants of the MC distributed throughout its parts, or if gametes or progeny can be derived from the plant that contain episomal descendants of the MC distributed through its parts.

[0041] “Centromere” is any DNA sequence that confers an ability to segregate to daughter cells through cell division. This sequence can produce a transmission efficiency to daughter cells ranging from about 1% to about 100%, including to about 5%, 10%, 20%, 30%, 40%, 50%, 60%, 70%, 80%, 90% or about 95% of daughter cells. Variations in transmission efficiency can find important applications within the scope of the invention; for example, MCs carrying centromeres that confer 100% stability could be maintained in all daughter cells without selection, while those that confer 1% stability could be temporarily introduced into a transgenic organism, but later eliminated when desired. In particular embodiments of the invention, the centromere can confer stable transmission to daughter cells of a nucleic acid sequence, including a recombinant construct comprising the centromere, through mitotic or meiotic divisions, including through both mitotic and meiotic divisions. A plant centromere is not necessarily derived from plants, but has the ability to promote DNA transmission to daughter plant cells.

[0042] “Circular permutations” refer to variants of a sequence that begin at base n within the sequence, proceed to the end of the sequence, resume with base number one of the sequence, and proceed to base n−1. For this analysis, n can be any number less than or equal to the length of the sequence. For example, circular permutations of the sequence ABCD are: ABCD, BCDA, CDAB, and DABC.

[0043] “Co-delivery” refers to the delivery of two nucleic acid segments to a cell. The segments can be delivered simultaneously or sequentially. The segments can be the same kind of vector (e.g. two MCs) or different (e.g. a combination of MC, T-DNA, viral vector, plasmid vector, etc.). Alternatively, the segments can be co-delivered on a single vector.

[0044] “Consensus” refers to a nucleic acid sequence derived by comparing two or more related sequences. A consensus sequence defines both the conserved and variable sites between the sequences being compared. Any one of the sequences used to derive the consensus or any permutation defined by the consensus can be useful in construction of MCs.

[0045] “Exogenous” when used in reference to a nucleic acid, for example, refers to any nucleic acid that has been introduced into a recipient cell, regardless of whether the same or similar nucleic acid is already present in such a cell. An “exogenous gene” can be a gene not normally found in the host genome in an identical context, or an extra copy of a host gene. The gene can be isolated from a different species than that of the host genome, or alternatively, isolated from the host genome but operably linked to one or more regulatory regions that differ from those found in the unaltered, native gene. The gene can also be synthesized in vitro.

[0046] “Functional” when referring to a MC, centromere, nucleic acid, or polypeptide, for example, retains a biological and/or an immunological activity of native or naturally-occurring chromosome, centromere, nucleic acid, or polypeptide, respectively. When used to describe an exogenous nucleic acid carried on an MC, “functional” means that the exogenous nucleic acid can function in a detectable manner when the MC is within a cell, such as a plant cell; exemplary functions of the exogenous nucleic acid include transcription of the exogenous nucleic acid, expression of the exogenous nucleic acid, regulatory control of expression of other exogenous nucleic acids, recognition by a restriction enzyme or other endonuclease, ribozyme or recombinase; providing a substrate for DNA methylation, DNA glycolation or other DNA chemical modification; binding to proteins such as histones, helix-loop-helix proteins, zinc binding proteins, leucine zipper proteins, MADS box proteins, topoisomerases, helicases, transposases, TATA box binding proteins, viral protein, reverse transcriptases, or cohesins; providing an integration site for homologous recombination; providing an integration site for a transposon, T-DNA or retrovirus; providing a substrate for RNAi synthesis; priming of DNA replication; aptamer binding; or kinetochore binding. If multiple exogenous nucleic acids are present within the MC, the function of one or preferably more of the exogenous nucleic acids can be detected under suitable conditions permitting function.

[0047] “Linker” refers to a DNA molecule, generally up to 50 or 60 nucleotides long, although linkers can be much larger, such as 100 bp, 1 kb, 100 kb, 1 Gb, etc., and composed of two or more complementary oligonucleotides that have been synthesized chemically, or excised or amplified from existing plasmids or vectors. In a preferred embodiment, this fragment contains one, or preferably more than one, restriction enzyme site for a blunt cutting enzyme and/or a staggered cutting enzyme, such as BamHI. One end of the linker is designed to be ligatable to one end of a linear DNA molecule and the other end is designed to be ligatable to the other end of the linear molecule, or both ends can be designed to be iigatable lo both ends of the linear DNA molecule.

[0048] A “mini-chromosome” (“MC”) is a recombinant DNA construct including a centromere and capable of transmission to daughter cells. A MC can remain separate from the host genome (as episomes) or can integrate into host chromosomes. The stability of this construct through cell division could range between from about 1% to about 100%, including about 5%, 10%, 20%, 30%, 40%, 50%, 60%, 70%, 80%, 90% and about 95%. The MC construct can be a circular or linear molecule. It can include elements such as one or more telomeres, origin of replication sequences, stuffer sequences, buffer sequences, chromatin packaging sequences, linkers and genes. The number of such sequences included is only limited by the physical size limitations of the construct itself. It can contain DNA derived from a natural centromere, although it can be preferable to limit the amount of DNA to the minimal amount required to obtain a transmission efficiency in the range of 1-100%. The MC can also contain a synthetic centromere composed of tandem arrays of repeats of any sequence, either derived from a natural centromere, or of synthetic DNA. The MC can also contain DNA derived from multiple natural centromeres. The MC can be inherited through mitosis or meiosis, or through both meiosis and mitosis. The term MC specifically encompasses and includes the terms “plant artificial chromosome” or “PLAC,” or engineered chromosomes or microchromosomes and all teachings relevant to a PLAC or plant artificial chromosome specifically apply to constructs within the meaning of the term MC.

[0049] “Non-protein expressing sequence” or “non-protein coding sequence” is defined herein as a nucleic acid sequence that is not eventually translated into protein. The nucleic acid can or can not be transcribed into RNA. Exemplary sequences include ribozymes or antisense RNA.

[0050] “Operably linked” is defined herein as a configuration in that a control sequence, e.g., a promoter sequence, directs transcription or translation of another sequence, for example a coding sequence. For example, a promoter sequence could be appropriately placed at a position relative to a coding sequence such that the control sequence directs the production of a polypeptide encoded by the coding sequence.

[0051] The term “plant,” as used herein, refers to any type of plant. Exemplary types of plants are listed below, but other types of plants will be known to those of skill in the art and could be used with the invention. Modified plants of the invention include, for example, dicots, gymnosperm, monocots, mosses, ferns, horsetails, club mosses, liver worts, homworts, red algae, brown algae, gametophytes and sporophytes of pteridophytes, and green algae.

[0052] A common class of plants exploited in agriculture are vegetable crops, including artichokes, kohlrabi, arugula, leeks, asparagus, lettuce (e.g., head, leaf, romaine), bok choy, malanga, broccoli, melons (e.g., muskmelon, watermelon, crenshaw, honeydew, cantaloupe), brussels sprouts, cabbage, cardoni, carrots, napa, cauliflower, okra, onions, celery, parsley, chick peas, parsnips, chicory, Chinese cabbage, peppers, collards, potatoes, cucumber plants (marrows, cucumbers), pumpkins, cucurbits, radishes, dry bulb onions, rutabaga, eggplant, salsify, escarole, shallots, endive, garlic, spinach, green onions, squash, greens, beet (sugar beet or fodder beet), sweet potatoes, swiss chard, horseradish, tomatoes, kale, turnips, or spices.

[0053] Other types of plants frequently finding commercial use include fruit and vine crops such as apples, grapes, apricots, cherries, nectarines, peaches, pears, plums, prunes, quince, almonds, chestnuts, filberts, pecans, pistachios, walnuts, citrus, blueberries, boysenberries, cranberries, currants, loganberries, raspberries, strawberries, blackberries, grapes, avocados, bananas, kiwi, persimmons, pomegranate, pineapple, tropical fruits, pomes, melon, mango, papaya, or lychee.

[0054] Modified wood and fiber or pulp plants of particular interest include, but are not limited to maple, oak, cherry, mahogany, poplar, aspen, birch, beech, spruce, fir, kenaf, pine, walnut, cedar, redwood, chestnut, acacia, bombax, alder, eucalyptus, catalpa, mulberry, persimmon, ash, honeylocust, sweetgum, privet, sycamore, magnolia, sourwood, cottonwood, mesquite, buckthorn, locust, willow, elderberry, teak, linden, bubinga, basswood or elm.

[0055] Modified flowers and ornamental plants of particular interest, include roses, petunias, pansy, peony, olive, begonias, violets, phlox, nasturtiums, irises, lilies, orchids, vinca, philodendron, poinscttias, opuntia, cyclamen, magnolia, dogwood, azalea, redbud, boxwood, Viburnum, maple, elderberry, hosta, agave, asters, sunflower, pansies, hibiscus, morning glory, alstromeria, zinnia, geranium, Prosopis, artemesia, clematis, delphinium, dianthus, gallium, coreopsis, iberis, lamium, poppy, lavender, leucophyllum, scdum, salvia, verbascum, digitalis, penstemon, savory, pythrethrum, or oenolhera. Modified nut-bearing trees of particular interest include, but are not limited to pecans, walnuts, macadamia nuts, hazelnuts, almonds, or pistachios, cashews, pignolas or chestnuts.

[0056] Many of the most widely grown plants are field crop plants such as evening primrose, meadow foam, corn (field, sweet, popcorn), hops, jojoba, peanuts, rice, safflower, small grains (barley, oats, rye, wheat, etc.), sorghum, tobacco, kapok, leguminous plants (beans, lentils, peas, soybeans), oil plants (rape, mustard, poppy, olives, sunflowers, coconut, castor oil plants, cocoa beans, groundnuts, oil palms), fibre plants (cotton, flax, hemp, jute), lauraceae (cinnamon, camphor), or plants such as coffee, sugarcane, cocoa, tea, or natural rubber plants.

[0057] Still other examples of plants include bedding plants such as flowers, cactus, succulents or ornamental plants, as well as trees such as forest (broad-leaved trees or evergreens, such as conifers), fruit, ornamental, or nut-bearing trees, as well as shrubs or other nursery stock.

[0058] Modified crop plants of particular interest in the present invention include soybean (Glycine max), cotton, canola (also known as rape), wheat, sunflower, sorghum, alfalfa, barley, safflower, millet, rice, tobacco, fruit and vegetable crops or turfgrasses. Exemplary cereals include maize, wheat, barley, oats, rye, millet, sorghum, rice triticale, secale, einkorn, spelt, emmer, teff, milo, flax, gramma grass, Tripsacum sp., or teosinte. Oil-producing plants include plant species that produce and store triacylglycerol in specific organs, primarily in seeds. Such species include soybean (Glycine max), rapeseed or canola (including Brassica napus, Brassica rapa or Brassica campestris), Brassica juncea, Brassica carinata, sunflower (Helianthus annuus), cotton (including Gossypium hirsutum), corn (Zea mays), cocoa (Theobroma cacao), safflower (Carthamus tinctorius), oil palm (Elaeis guineensis), coconut palm (Cocos nucifera), flax (Linum usitatissimum), castor (Ricinus communis) or peanut (Arachis hypogaea).

[0059] “Cotton” includes species of the genus Gossypium, including the commercially important cottons, Gossypium hirsutum (Upland cotton), Gossypium herbaceum (Levant cotton), Gossypium arboreum (Tree cotton), and Gossypium barbadense (Pima cotton), as well as the non-commercial species, including Gossypium darwinii (Darwin's cotton), Gossypium tomentosum (Hawaiian cotton), Gossypium australe (Australian cotton), Gossypium sturtianum (Sturt's Desert Rose), Gossypium thurberi (Arizona wild cotton), Gossypium anomalum, Gossypium triphyllum, Gossypium somalense, Gossypium stocksii, Gossypium longicalyx, Gossypium robinsonii, Gossypium bickii, Gossypium capitis-viridis, Gossypium trifurcatum, Gossypium armourianum, Gossypium harknessii, Gossypium davidsonii, Gossypium klotschianum, Gossypium aridum, Gossypium gossypioides, Gossypium lobatum, Gossypium trilobatum, Gossypium laxum, Gossypium turneri, Gossypium schwendimanii, Gossypium areysianum, Gossypium incanum, Gossypium trifurcatum, Gossypium benidirense, Gossypium bricchettii, Gossypium vollesenii, Gossypium trifurcatum, Gossypium nelsonii, Gossypium anapoides, Gossypium costulatum, Gossypium cunninghamii, Gossypium enthyle, Gossypium exiguum, Gossypium londonderriense, Gossypium marchantii, Gossypium nobile, Gossypium pilosum, Gossypium populifolium, Gossypium pulchellum, Gossypium rotundifolium, Gossypium mustelinum and Gossypium raimondii. Most cotton is diploid; however, several species are tetraploid, including the commercially important G. hirsutum and G. barbadense. Other tetraploid species include G. tomentosum, G. mustelinum, and G. darwinii. Cotton, as used herein, also includes any hybrid between these species, and any polyploidy derived from these species. Cotton can also be subdived into genome types or groups. Diploid species (2n=26) fall into eight genomic groups (A-G, and K). The African Glade, comprising the A, B, E, and F genomes, occurs naturally in Africa and Asia, while the D genome Glade is indigenous to the Americas. A third diploid Glade, including C, G, and K, is found in Australia. Polyploid cotton, such as G. hirsutum, can contain more than one genomic group (such as A and D).

[0060] “Plant part” includes pollen, silk, endosperm, ovule, seed, embryo, pods, roots, cuttings, tubers, stems, stalks, fiber (lint), square, boll, fruit, berries, nuts, flowers, leaves, bark, wood, whole plant, plant cell, plant organ, epidermis, vascular tissue, protoplast, cell culture, crown, callus culture, petiole, petal, sepal, stamen, stigma, style, bud, meristem, cambium, cortex, pith, sheath, or any group of plant cells organized into a structural and functional unit. In one preferred embodiment, the exogenous nucleic acid is expressed in a specific location or tissue of a plant, for example, epidermis, vascular tissue, meristem, cambium, cortex, pith, leaf, sheath, flower, root or seed.

[0061] “Promoter” is a DNA sequence that allows the binding of RNA polymerase (including but not limited to RNA polymerase I, RNA polymerase II and RNA polymerase III from eukaryotes), and optionally other accessory or regulatory factors, and directs the polymerase to a downstream transcriptional start site of a nucleic acid sequence encoding a polypeptide to initiate transcription. RNA polymerase effectively catalyzes the assembly of messenger RNA complementary to the appropriate DNA strand of the coding region.

[0062] A “promoter operably linked to a heterologous gene” is a promoter that is operably linked to a gene that is different from the gene to that the promoter is normally operably linked in its native state. Similarly, an “exogenous nucleic acid operably linked to a heterologous regulatory sequence” is a nucleic acid that is operably linked to a regulatory control sequence to that it is not normally linked in its native state.

[0063] “Hybrid promoter” means parts of two or more promoters that are fused together to generate a sequence that is a fusion of the two or more promoters, that is operably linked to a coding sequence and mediates the transcription of the coding sequence into mRNA.

[0064] “Tandem promoter” means two or more promoter sequences each of that is operably linked to a coding sequence and mediates the transcription of the coding sequence into mRNA.

[0065] “Constitutive active promoter” means a promoter that allows permanent and stable expression of the gene of interest.

[0066] “Inducible promoter” means a promoter induced by the presence or absence of a biotic or an abiotic factor.

[0067] “Polypeptide” does not refer to a specific length of the encoded product and, therefore, encompasses peptides, oligopeptides, and proteins. “Exogenous polypeptide” means a polypeptide that is not native to the plant cell, a native polypeptide in that modifications have been made to alter the native sequence, or a native polypeptide whose expression is quantitatively altered as a result of a manipulation of the plant cell by recombinant DNA techniques.

[0068] “Pseudogene” refers to a non-functional copy of a protein-coding gene; pseudogenes found in the genomes of eukaryotic organisms are often inactivated by mutations and are thus presumed to be non-essential to that organism; pseudogenes of reverse transcriptase and other open reading frames found in retroelements are abundant in the centromeric regions of Arabidopsis and other organisms and are often present in complex clusters of related sequences.

[0069] “Regulatory sequence” refers to any DNA sequence that influences the efficiency of transcription or translation of any gene. The term includes sequences comprising promoters, enhancers and terminators.

[0070] “Repeated nucleotide sequence” refers to any nucleic acid sequence of at least 25 bp present in a genome or a recombinant molecule, other than a telomere repeat, that occurs at least two or more times and that are preferably at least 80% identical either in head to tail or head to head orientation either with or without intervening sequence between repeat units.

[0071] “Retroelement” or “retrotransposon” refers to a genetic element related to retroviruses that disperse through an RNA stage; the abundant retroelements present in plant genomes contain long terminal repeats (LTR retrotransposons) and encode a polyprotein gene that is processed into several proteins including a reverse transcriptase. Specific retroelements (complete or partial sequences (e.g., “retroelement-like sequence,” “retrotransposon-like sequence,” and “retroelement-derived sequence”) can be found in and around plant centromeres and can be present as dispersed copies or complex repeat clusters. Individual copies of retroelements can be truncated or contain mutations; intact retrolements are rarely encountered.

[0072] “Satellite DNA” refers to short DNA sequences (typically <1000 bp) present in a genome as multiple repeats, mostly arranged in a tandemly repeated fashion, as opposed to a dispersed fashion. Repetitive arrays of specific satellite repeats are abundant in the centromeres of many higher eukaryotic organisms.

[0073] “Screenable marker” is a gene whose presence results in an identifiable phenotype. This phenotype can be observed under standard conditions, altered conditions such as elevated temperature, or in the presence of certain chemicals used to detect the phenotype. The use of a screenable marker allows for the use of lower, sub-killing antibiotic concentrations and the use of a visible marker gene to identify clusters of transformed cells, and then manipulation of these cells to homogeneity. Examples of screenable markers include genes that encode fluorescent proteins that are detectable by a visual microscope such as the fluorescent reporter genes DsRed, ZsGreen, ZsYellow, AmCyan, Green Fluorescent Protein (GFP). An additional preferred screenable marker gene is lac.

[0074] The invention also contemplates novel methods of screening for adchromosomal plant cells that involve use of relatively low, sub-killing concentrations of a selection agent (e.g., sub-killing antibiotic concentrations), and also involve use of a screenable marker (e.g., a visible marker gene) to identify clusters of modified cells carrying the screenable marker, after that these screenable cells are manipulated to homogeneity. A “selectable marker” is a gene whose presence results in a clear phenotype, and most often a growth advantage for cells that contain the marker. This growth advantage can be present under standard conditions, altered conditions such as elevated temperature, specialized media compositions, or in the presence of certain chemicals such as herbicides or antibiotics. Examples of selectable markers include the thymidine kinase gene, the cellular adenine phosphoribosyltransferase gene and the dihydrylfblatc rcductase gene, hygromycin phosphotransferase genes, bar, neomycin phosphotransferase genes and phosphomannose isomerase, among others. Especially useful selectable markers in the present invention include genes whose expression confer antibiotic or herbicide resistance to the host cell, or proteins allowing utilization of a carbon source not normally utilized by plant cells. Especially useful are proteins conferring cellular resistance to kanamycin, G 418, paramomycin, hygromycin, bialaphos, and glyphosate for example, or proteins allowing utilization of a carbon source, such as mannose, not normally utilized by plant cells.

[0075] “Stable” means that a MC can be transmitted to daughter cells over at least 8 mitotic generations. Some embodiments of MCs can be transmitted as functional, autonomous units for less than 8 mitotic generations, e.g., 1, 2, 3, 4, 5, 6, or 7. Preferred MCs can be transmitted over at least 8, 9, 10, 11, 12, 13, 14, 15, 16, 17, 18, 18, 19, 20, 21, 22, 23, 24, 25, 26, 27, 28, 29 or 30 mitotic generations, for example, through the regeneration or differentiation of an entire plant, and preferably are transmitted through meiotic division to gametes. Other preferred MCs can be further maintained in the zygote derived from such a gamete or in an embryo or endosperm derived from one or more such gametes. A “functional and stable” MC is one in that functional MCs can be detected after transmission of the MCs over at least 8 mitotic generations, or after inheritance through a meiotic division. During mitotic division, as occurs occasionally with native chromosomes, there can be some non-transmission of MCs; the MC can still be characterized as stable despite the occurrence of such events if an adchromosomal plant that contains descendants of the MC distributed throughout its parts can be regenerated from cells, cuttings, propagules, or cell cultures containing the MC, or if an adchromosomal plant can be identified in progeny of the plant containing the MC.

[0076] “Structural gene” is a sequence that codes for a polypeptide or RNA and includes 5′ and 3′ ends. The structural gene can be from the host into which the structural gene is transformed or from another species. A structural gene usually includes one or more regulatory sequences that modulate the expression of the structural gene, such as a promoter, terminator or enhancer. Structural genes often confer some useful phenotype upon an organism comprising the structural gene, for example, herbicide resistance. A structural gene can encode an RNA sequence that is not translated into a protein, for example a tRNA or rRNA gene.

[0077] “Synthetic,” when used in the context of a polynucleotide or polypeptide, refers to a molecule that is made using standard synthetic techniques, e.g., using an automated DNA or peptide synthesizer. Synthetic sequence can be a native sequence, or a modified sequence.

[0078] “Telomere” or “telomere DNA” refers to a sequence capable of capping the ends of a chromosome, thereby preventing degradation of the chromosome end, ensuring replication and preventing fusion to other chromosome sequences. Telomeres can include naturally occurring telomere sequences or synthetic sequences. Telomeres from one species can confer telomere activity in another species. An exemplary telomere DNA is a heptanucleotide telomere repeat TTTAGGG (SEQ ID NO:98; and its complement) found in the majority of plants.

[0079] “Trait” refers either to the altered phenotype of interest or the nucleic acid that causes the altered phenotype of interest.

[0080] “Transformed,” “transgenic,” “modified,” and “recombinant” refer to a host organism such as a plant into which an exogenous or heterologous nucleic acid molecule has been introduced, and includes whole plants, meiocytes, seeds, zygotes, embryos, endosperm, or progeny of such plants that retain the exogenous or heterologous nucleic acid molecule but that have not themselves been subjected to the transformation process.

[0081] When the phrase “transmission efficiency” of a certain percent is used, transmission percent efficiency is calculated by measuring MC presence through one or more mitotic or meiotic generations. It is directly measured as the ratio (expressed as a percentage) of the daughter cells or plants demonstrating presence of the MC to parental cells or plants demonstrating presence of the MC. Presence of the MC in parental and daughter cells is demonstrated with assays that detect the presence of an exogenous nucleic acid carried on the MC. Exemplary assays can be the detection of a scrcenable marker (e.g., presence of a fluorescent protein or any gene whose expression results in an observable phenotype), a selectable marker, or PCR amplification of any exogenous nucleic acid carried on the MC.

### III. Making and Using the Invention

### A. Selected Embodiments

[0082] The following embodiments are not meant to limit the invention in any way.

[0083] One aspect of the invention is related to plants containing functional, stable, autonomous MCs, preferably carrying one or more exogenous nucleic acids. Such plants carrying MCs are contrasted to transgenic plants with genomes that have been altered by chromosomal integration of an exogenous nucleic acid. Expression of the exogenous nucleic acid results in an altered phenotype of the plant. The invention provides for MCs comprising at least 1, 2, 3, 4, 5, 6, 7, 8, 9, 10, 11, 12, 13, 14, 15, 16, 17, 18, 19, 20, 21, 22, 23, 24, 25, 30, 35, 40, 45, 50, 60, 70, 80, 90, 100, 110, 120, 130, 140, 150, 250, 500, 1000 or more exogenous nucleic acids.

[0084] Any plants, including bryophytes, algae, seedless vascular plants, monocots, dicots, gymnosperm, field crops, vegetable crops, fruit and vine crops, can be modified by carrying autonomous MCs. Plant parts or plant tissues, including pollen, silk, endosperm, ovule, seed, embryo, pods, roots, cuttings, tubers, stems, stalks, fiber (lint), square, boll, fruit, berries, nuts, flowers, leaves, bark, epidermis, vascular tissue, whole plant, plant cell, plant organ, protoplast, crown, callus culture, petiole, petal, sepal, stamen, stigma, style, bud, meristem, cambium, cortex, pith, sheath, cell culture, or any group of plant cells organized into a structural and functional unit, any cells of can carry MCs.

[0085] A related aspect of the invention is adchromosomal plant parts or plant tissues, including pollen, silk, endosperm, ovule, seed, embryo, pods, roots, cuttings, tubers, stems, stalks, crown, fiber (lint), square, boll, callus culture, petiole, petal, sepal, stamen, stigma, style, bud, fruit, berries, nuts, flowers, leaves, bark, wood, whole plant, plant cell, plant organ, protoplast, cell culture, or any group of plant cells organized into a structural and functional unit. In one preferred embodiment, the exogenous nucleic acid is primarily expressed in a specific location or tissue of a plant, for example, epidermis, fiber (lint), boll, square, vascular tissue, meristem, cambium, cortex, pith, leaf, sheath, flower, root or seed. Tissue-specific expression can be accomplished with, for example, localized presence of the MC, selective maintenance of the MC, or with promoters that drive tissue-specific expression.

[0086] Another related aspect of the invention is meiocytes, pollen, ovules, endosperm, seed, somatic embryos, apomyctic embryos, embryos derived from fertilization, vegetative propagules and progeny of the originally adchromosomal plant and of its filial generations that retain the functional, stable, autonomous MC. Such progeny include clonally propagated plants, embryos and plant parts as well as filial progeny from self- and cross-breeding, and from apomyxis.

[0087] The MC can be transmitted to subsequent generations of viable daughter cells during mitotic cell division with a transmission efficiency of at least 1%, 5%, 10%, 20%, 30%, 40%, 50%, 60%, 70%, 80%, 85%, 90%, 95%, 96%, 97%, 98%, or 99%. The MC is transmitted to viable gametes during meiotic cell division with a transmission efficiency of at least 1%, 5%, 10%, 20%, 30%, 40%, 50%, 60%, 70%, 80%, 85%, 90%, 95% o, 96%, 97%, 98%, or 99% when more than one copy of the MC is present in the gamete mother cells of the plant. The MC is transmitted to viable gametes during meiotic cell division with a transmission frequency of at least 1%, 5%, 10%, 20%, 30%, 40%, 45%, 46%, 47%, 48%, or 49% when one copy of the MC is present in the gamete mother cells of the plant and meiosis produces four viable products (e.g. typical male meiosis) When meiosis produces fewer than four viable products (e.g. typical female meiosis) a phenomenon called meiotic drive can cause the preferential segregation of particular chromosomes into the viable product resulting in higher than expected transmission frequencies of monoosmes through meiosis including at least 51%, 60%, 70%, 80%, 90% 95%, 96%, 97%, 98%, or 99%. For production of seeds via sexual reproduction or by apomyxis, the MC can be transferred into at least 1%, 5%, 10%, 20%, 25%, 30%, 40%, 50%, 60%, 70%, 80%, 85%, 90%, 95%, 96%, 97%, 98%, or 99% of viable embryos when cells of the plant contain more than one copy of the MC. For sexual seed production or apomyxitic seed production from plants with one MC per cell, the MC can be transferred into at least 1%, 5%, 10%, 20%, 30%, 40%, 50%, 60%, 70%, 71%, 72%, 73%, 74%, 75% of viable embryos.

[0088] A MC that comprises an exogenous selectable trait or exogenous selectable marker can be used to increase the frequency in subsequent generations of adchromosomal cells, tissues, gametes, embryos, endosperm, seeds, plants or progeny. For example, the frequency of transmission of MCs into viable cells, tissues, gametes, embryos, endosperm, seeds, plants or progeny can be significantly increased after mitosis or meiosis by applying a selection that favors the survival of adchromosomal cells, tissues, gametes, embryos, endosperm, seeds, plants or progeny over cells, tissues, gametes, embryos, endosperm, seeds, plants or progeny lacking the MC.

[0089] Transmission efficiency can be measured as the percentage of progeny cells or plants that carry the MC by one of several assays, including detecting expression of a reporter gene (e.g., a gene encoding a fluorescenct protein), PCR detection of a sequence that is carried by the MC, RT-PCR detection of a gene transcript for a gene carried on the MC, Western analysis of a protein produced by a gene carried on the MC, Southern analysis of the DNA (either in total or a portion thereof) carried by the MC, fluorescence in situ hybridization (FISH) or in situ localization by repressor binding. Efficient transmission as measured by some benchmark percentage indicates the degree to which the MC is stable through the mitotic and meiotic cycles. Plants of the invention can also contain chromosomally integrated exogenous nucleic acid in addition to the autonomous MCs. The adchromosomal plants or plant parts, including plant tissues, can include plants that have chromosomal integration of some portion of the MC (e.g., exogenous nucleic acid or centromere sequence) in some or all cells of the plant. The plant, including plant tissue or plant cell, is still characterized as adchromosomal, despite the occurrence of some chromosomal integration. An adchromosomal plant can also have a MC plus non-MC integrated DNA. For example, a standard integrated transgenic plant that subsequently has a MC delivered to it (by crossing or transformation) is an adchromosomal plant. Similarly, an adchromosomal plant that has an integrative transgene delivered to one or more of its chromosomes (including plastid or organellar chromosomes) remains an adchromosomal plant by virtue of the presence of the autonomous MC. In one aspect, the autonomous MC can be isolated from integrated exogenous nucleic acid by crossing the adchromosomal plant containing the integrated exogenous nucleic acid with plants producing some gametes lacking the integrated exogenous nucleic acid and subsequently isolating offspring of the cross, or subsequent crosses, that are adchromosomal but lack the integrated exogenous nucleic acid. This independent segregation of the MC is one measure of the autonomous nature of the MC.

[0090] Another aspect of the invention relates to methods for producing and isolating such adchromosomal plants containing functional, stable, autonomous MCs.

[0091] In one embodiment, the invention contemplates improved methods for isolating native centromere sequences. In another embodiment, the invention contemplates methods for generating variants of native or artificial centromere sequences by passage through bacterial or plant or other host cells.

[0092] In yet another embodiment, the invention contemplates improved methods for regenerating plants, including methods for co-delivery of growth-inducing genes with MCs. The growth delivery genes include Agrobacterium tumefaciens or Arhizogenes isopentenyl transferase (IPT) genes involved in cytokinin biosynthesis, plant IPT genes involved in cytokinin biosynthesis (from any plant), Agrobacterium tumefaciens IAAH, IAAM genes involved in auxin biosynthesis (indole-3-acetamide hydrolase and tryptophan-2-monooxygenase, respectively), Agrobacterium rhizogenes rolA, rolB and rolC genes involved in root formation, Agrobacterium tumefaciens Aux1, Aux2 genes involved in auxin biosynthesis (indole-3-acetamide hydrolase or tryptophan-2-monooxygenase genes), Arabidopsis thaliana leafy cotyledon genes (e.g., Lec1, Lec2) promoting embryogenesis and shoot formation, Arabidopsis thaliana ESR1 gene involved in shoot formation (Banno et al., 2001), Arabidopsis thaliana PGA6/WUSCHEL gene involved in embryogenesis (Zuo, Niu et al. 2002).

[0093] The invention further provides isolated promoter nucleic acid sequences comprising any one of SEQ ID NOS:1 to 20, or fragments or variants thereof that retain expression-promoting activity. MCs comprising non-plant promoter sequences such as these that are operably linked to plant-expressed genes (e.g., genes that confer a different phenotype on plants), are contemplated as are plants comprising such MCs.

[0094] Another aspect of the invention relates to methods for using such adchromosomal plants containing a MC for producing animal feed, food products, pharmaceutical products and chemical products by appropriate expression of exogenous nucleic acid(s) contained within a MC.

[0095] In some animal systems it has been possible to use MCs with centromeres from one species in the cells of a different species (Cavaliere, Scoarughi et al. 2009). Thus, another aspect of the invention is an adchromosomal plant comprising a functional, stable, autonomous MC that contains centromere sequence derived from a different taxonomic plant species, or derived from a different taxonomic plant species, genus, family, order or class.

[0096] Yet another aspect of the invention provides novel autonomous MCs used to transform plant cells that are in turn used to generate a plant (or multiple plants). Exemplary MCs of the invention are contemplated to be of a size 2000 kb or less. Other exemplary sizes of MCs include less than or equal to, e.g., 1500 kb, 1000 kb, 900 kb, 800 kb, 700 kb, 600 kb, 500 kb, 450 kb, 400 kb, 350 kb, 300 kb, 250 kb, 200 kb, 150 kb, 100 kb, 90 kb, 80 kb, 70 kb, 60 kb, or 40 kb.

[0097] Novel centromere compositions as characterized by sequence content, size, spatial arrangement of sequence motifs, or other parameters. Preferably, the minimal size of centromeric sequence is used in MC construction. Exemplary sizes include a centromeric nucleic acid insert derived from a portion of plant genomic DNA, that is less than or equal to 1000 kb, 900 kb, 800 kb, 700 kb, 600 kb, 500 kb, 400 kb, 300 kb, 200 kb, 150 kb, 100 kb, 95 kb, 90 kb, 85 kb, 80 kb, 75 kb, 70 kb, 65 kb, 60 kb, 55 kb, 50 kb, 45 kb, 40 kb, 35 kb, 30 kb, 25 kb, 20 kb, 15 kb, 10 kb, 5 kb, 4 kb, 3 kb, 2 kb, or 1 kb.

[0098] The invention also contemplates MCs or other vectors comprising fragments or variants of the genomic DNA inserts of the described BAC clones, or naturally occurring descendants thereof, that retain the ability to segregate during mitotic or meiotic division, as well as adchromosomal plants or parts containing these MCs. Other exemplary embodiments include fragments or variants of the genomic DNA inserts of any of the identified BAC clones, or descendants thereof, and fragments or variants of the centromeric nucleic acid inserts of any of the vectors or MCs identified herein.

[0099] In other exemplary embodiments, the invention contemplates MCs or other vectors comprising centromeric nucleotide sequence that when hybridized to 1, 2, 3, 4, 5, 6, 7, 8, 9, 10, 11, 12, 13, 14, 15, 16, 17, 18, 19, 20, 30, 40, 50, 60, 70, 80, 90, 100 or more probes, including thosedescribed in the Examples, under hybridization conditions described herein, e.g., low, medium or high stringency, provides relative hybridization scores as described in the Examples.

### B. Composition of MCs and MC Construction

[0100] The MC vector of the present invention can contain a variety of elements, including: (1) sequences that function as plant centromeres; (2) one or more exogenous nucleic acids; (3) sequences that function as an origin of replication, that can be included in the region that functions as plant centromere, and optional; (4) a bacterial plasmid backbone for propagation of the plasmid in bacteria, though this element may be designed to be removed prior to delivery to a plant cell; (5) sequences that function as plant telomeres (particularly if the MC is linear); (6) optionally, additional “stuffer DNA” sequences that serve to separate the various components on the MC from each other; (7) optionally, “buffer” sequences such as MARs or SARs; (8) optionally, marker sequences of any origin, including but not limited to plant and bacterial origin; (9) optionally, sequences that serve as recombination sites; and (10) optionally, “chromatin packaging sequences” such as cohesion and condensing binding sites.

### C. Novel Centromere Compositions

[0101] The centromere in the MC of the present invention can comprise novel repeating centromeric sequences, such as those of SEQ ID NOS:90-92. Alternatively, the centromere of the MCs of the present invention comprise the nucleic acid sequence of SEQ ID NO:94, or portion of SEQ ID NO:94 that confers centromere function. Alternatively, the centromere of the MCs of the present invention comprise thenucleic acid sequence of SEQ ID NO:97. Alternatively, the centromere of the MCs of the present invention comprise the CenCORE sequence (SEQ ID NO:95) in isolation or flanked by CenFL (SEQ ID NO:96) sequence at both the 5′ and 3′ ends, either directly adjacent to SEQ ID NO:95, or separated by intervening sequence. In yet other embodiments, the centromere of the MCs of the present invention comprises SEQ ID NO:97 or SEQ ID NO:95, wherein these sequences further comprise an insertion of 1 bp to 3 kb, wherein the insertion is of any nucleic acid sequence. Alternatively, the centromere of the MCs of the present invention can comprise multiple copies of SEQ ID NO: 94, or SEQ ID NO:95, or SEQ ID NO:96, or SEQ ID NO:97 arrayed tandemly in a head-to-head or head-to-tail orientation with or without interviening nucleic acid sequences. Alternatively, the centromere of the MCs of the present invention can comprise a combination of two or more of SEQ ID NO: 94, or SEQ ID NO:95, or SEQ ID NO:96, or SEQ ID NO:97. All possible combinations of these sequence elements are envisioned, including combinations in which any individual element type is represented more than once.

[0102] Exemplary embodiments of centromere nucleic acid sequences according to the present invention include fragments or variants of the genomic DNA inserts of the BAC clones described that retain the ability to segregate during mitotic or meiotic division. Variants of such sequences include artificially produced modifications and modifications produced via passaging through one or more bacteria, plant or other host cells. Vectors comprising 1, 2, 3, 4, 5, 6, 7, 8, 9, 10, 15 or 20 or more of the elements contained in any of the exemplary vectors are also contemplated.

[0103] The invention specifically contemplates the alternative use of fragments or variants (mutants) of any of the nucleic acids described herein that retain the desired activity, including nucleic acids that function as centromeres, nucleic acids that function as promoters or other regulatory control sequences, or exogenous nucleic acids. Variants can have one or more additions, substitutions or deletions of nucleotides within the original nucleotide sequence. Variants include nucleic acid sequences that are at least 50, 55, 60, 65, 70, 75, 80, 81, 82, 83, 84, 85, 86, 87, 88, 89, 90, 91, 92, 93, 94, 95, 96, 97, 98, or 99% identical to the original nucleic acid sequence. Variants also include nucleic acid sequences that hybridize under low, medium, high or very high stringency conditions to the original nucleic acid sequence.

[0104] The comparison of sequences and determination of percent identity between two nucleotide sequences can be accomplished using a mathematical algorithm. For example, the percent identity between two amino acid sequences can be determined using the Needleman and Wunsch algorithm that has been incorporated into the GAP program in the GCG software package (Needleman and Wunsch 1970), using either a Blossum 62 matrix or a PAM250 matrix. Parameters are set so as to maximize the percent identity.

[0105] “Hybridizes under low stringency, medium stringency, and high stringency conditions” describes conditions for hybridization and washing. Hybridization is a well-known technique (Ausubel 1987). Low stringency hybridization conditions means, for example, hybridization in 6× sodium chloride/sodium citrate (SSC) at about 45° C., followed by two washes in 0.5×SSC, 0.1% SDS, at least at 50° C.; medium stringency hybridization conditions means, for example, hybridization in 6×SSC at about 45° C., followed by one or more washes in 0.2×SSC, 0.1%) SDS at 55° C.; and high stringency hybridization conditions means, for example, hybridization in 6×SSC at about 45° C., followed by one or more washes in 0.2×SSC, 0.1% SDS at 65° C. Another non limiting example of stringent hybridization conditions are hybridization in a high salt buffer comprising 6×SSC, 50 mM Tris HCl (pH 7.5), 1 mM EDTA, 0.02% PVP, 0.02% Ficoll, 0.02% BSA, and 500 mg/ml denatured salmon sperm DNA at 65° C., followed by one or more washes in 0.2×SSC, 0.01% BSA at 50° C. Another non limiting example of moderate stringency hybridization conditions are hybridization in 6×SSC, 5×Denhardt's solution, 0.5% SDS and 100 mg/ml denatured salmon sperm DNA at 55° C., followed by one or more washes in 1×SSC, 0.1% SDS at 37° C. Another non limiting example of low stringency hybridization conditions are hybridization in 35% formamide, 5×SSC, 50 mM Tris HCl (pH 7.5), 5 mM EDTA, 0.02% PVP, 0.02% Ficoll, 0.2% BSA, 100 mg/ml denatured salmon sperm DNA, 10% (wt/vol) dextran sulfate at 40° C., followed by one or more washes in 2×SSC, 25 mM Tris HCl (pH 7.4), 5 mM EDTA, and 0.1% SDS at 50° C. Other conditions of low stringency that may be used are well known in the art (e.g., as employed for cross species hybridizations).

[0106] MC Sequence Content and Structure

[0107] Plant-expressed genes from non-plant sources can be modified to accommodate plant codon usage, to insert preferred motifs near the translation initiation ATG codon, to remove sequences recognized in plants as 5′ or 3′ splice sites, or to better reflect plant GC/AT content. Plant genes typically have a GC content of more than 35%, and coding sequences that are rich in A and T nucleotides can be problematic. For example, ATTTA motifs can destabilize mRNA; plant polyadenylation signals such as AATAAA at inappropriate positions within the message can cause premature truncation of transcription; and monocotyledons can recognize AT-rich sequences as splice sites.

[0108] Each exogenous nucleic acid or plant-expressed gene can include a promoter, a coding region and a terminator sequence, that can be separated from each other by restriction endonucleasc sites or recombination sites or both. Genes can also include introns, that can be present in any number and at any position within the transcribed portion of the gene, including the 5′ untranslated sequence, the coding region and the 3′ untranslated sequence. Introns can be natural plant introns derived from any plant, or artificial introns based on the splice site consensus that has been defined for plant species. Some intron sequences have been shown to enhance expression in plants. Optionally the exogenous nucleic acid can include a plant transcriptional terminator, non-translated leader sequences derived from viruses that enhance expression, a minimal promoter, or a signal sequence controlling the targeting of gene products to plant compartments or organelles.

[0109] The coding regions of the genes can encode any protein, including visible marker genes (for example, fluorescent protein genes, other genes conferring a visible phenotype), other screenable or selectable marker genes (for example, conferring resistance to antibiotics, herbicides or other toxic compounds, or encoding a protein that confers a growth advantage to the cell expressing the protein) or genes that confer some commercial or agronomic value to the adchromosomal plant. Multiple genes can be placed on the same MC vector. The genes can be separated from each other by restriction endonuclease sites, homing endonuclease sites, recombination sites or any combinations thereof. Any number of genes can be present. Genes on a MC can be in any orientation with respect to one another and with respect to the other elements of the MC (e.g. the centromere).

[0110] The MC vector can also contain a bacterial plasmid backbone for propagation of the plasmid in bacteria such as E. coli, A. tumefaciens, or A. rhizogenes. The plasmid backbone can be that of a low-copy vector or mid to high level copy backbone. This backbone can contain the replicon of the F′ plasmid of E. coli. However, other plasmid replicons, such as the bacteriophage P1 replicon, or other low-copy plasmid systems, such as the RK2 replication origin, can also be used. The backbone can include one or several antibiotic-resistance genes conferring resistance to a specific antibiotic to the bacterial cell in that the plasmid is present. Examples of bacterial antibiotic-resistance genes include kanamycin-, ampicillin-, chloramphenicol-, streptomycin-, spectinomycin-, tetracycline- and gentamycin-resistance genes. The backbone can also be designed so that it can be excised from the MC prior to delivery to a plant cell. The use of flanking restriction enzyme sites or flanking site-specific recombination sites are both useful for constructing a removable backbone.

[0111] The MC vector can also contain plant telomeres. An exemplary telomere sequence is tttaggg (SEQ ID NO:98) or its complement. Telomeres stabilize the ends of linear chromosomes and facilitate the complete replication of the extreme termini of the DNA molecule (Ausubel, 1987; Richards and Ausubel, 1988).

[0112] Additionally, the MC vector can contain “stuffer DNA” sequences that serve to separate the various components on the MC. Stuffer DNA can be of any origin, synthetic, prokaryotic or eukaryotic, and from any genome or species, plant, animal, microbe or organelle. Stuffer DNA can range from 10 bp, 20 bp, 30 bp, 40 bp, 50 bp, 60 bp, 70 bp, 80 bp, 90 bp, 100 bp, 150 bp, 200 bp, 300 bp, 400 bp 500 bp, 750 bp, 1000 bp, 2000 bp, 5000 bp, 10 kb, 20 kb, 50 kb, 75 kb, 1 Mb to 10 Mb in length and can be repetitive in sequence, with unit repeats from 10 bp to 1 Mb. Examples of repetitive sequences that can be used as stuffer DNAs include rDNA, satellite repeats, retroelements, transposons, pseudogenes, transcribed genes, microsatellites, tDNA genes, short sequence repeats and combinations thereof. Alternatively, stuffer DNA can consist of unique, non-repetitive DNA of any origin or sequence. The stuffer sequences can also include DNA with the ability to form boundary domains, such as scaffold attachment regions (SARs) or matrix attachment regions (MARs). Stuffer DNA can be entirely synthetic, composed of random sequence, having any base composition, or any A/T or G/C content.

[0113] In one embodiment of the invention, the MC has a circular structure without telomeres. In another embodiment, the MC has a circular structure with telomeres. In a third embodiment, the MC has a linear structure with telomeres. A “linear” structure can be generated by cutting a circular MC that contains telomeres with an endonuclease(s), that expoes the telomeres at the ends of the resultant linear nucleic acid molecule that contains all of the sequence contained in the original, closed construct. A variant of this strategy is to separate two telomere elements with an antibiotic-resistance gene that is also excised upon linearization. In a fourth embodiment of the invention, the telomeres could be placed in such a manner that the bacterial replicon, backbone sequences, antibiotic-resistance genes and any other sequences of bacterial origin and present for the purposes of propagation of the MC in bacteria, can be removed from the plant-expressed genes, the centromere, telomeres, and other sequences by cutting the structure with an endonuclease(s). When removing intervening sequences to expose telomere elements during linearization site-specific recombination systems can be used instead of endoculeases. These linearization techniques result in a MC from which much of, or preferably all, bacterial sequences have been removed. In this embodiment, bacterial sequence present between or among the plant-expressed genes or other MC sequences are excised prior to removal of the remaining bacterial sequences by cutting the MC with a homing endonuclease, and re-ligating the structure or by using site-specific recombination systems. Particularly useful endonucleases are those that are present only at the desired linearization site (unique), including homing endonuclease sites. Alternatively, the endonucleases and their sites can be replaced with any specific DNA cutting mechanism and its specific recognition site, such as a rare-cutting endonuclease or recombinase and its specific recognition site, as long as that site is present in the MC.

[0114] Various structural configurations of the MC elements are possible. A centromere can be placed on a MC either between genes or outside a cluster of genes next to a telomere. Stuffer DNAs can be combined with these configurations including stuffer sequences placed inside the telomeres, around the centromere between genes or any combination thereof. Thus, a large number of alternative MC structures are possible, depending on the relative placement of centromere DNA, genes, stuffer DNAs, bacterial sequences, telomeres, and other sequences. Such variations in architecture are possible both for linear and for circular MCs.

[0115] Exemplary Centromere Components

[0116] In one embodiment, the centromere contains n copies of a repeated nucleotide sequence, such as that of SEQ ID NOs:90-92 or of SEQ ID NOs:94-97, wherein n is at least 2. In another embodiment, the centromere contains n copies of interdigitated repeats. An interdigitated repeat is a DNA sequence that consists of two distinct repetitive elements that combine to create a unique permutation. Potentially any number of repeat copies capable of physically being placed on the recombinant construct could be included on the construct, including about 2, 3, 4, 5, 6, 7, 8, 9, 10, 11, 12, 13, 14, 15, 16, 17, 18, 19, 20, 25, 30, 35, 40, 45, 50, 60, 70, 80, 90, 100, 120, 140, 150, 200, 300, 400, 500, 750, 1,000, 1,500, 2,000, 3,000, 5,000, 7,500, 10,000, 20,000, 30,000, 40,000, 50,000, 60,000, 70,000, 80,000, 90,000 and about 100,000, including all ranges in-between such copy numbers. Moreover, the copies can vary from each other, such as is commonly observed in naturally occurring centromeres. The length of the repeat can vary, but will preferably range from about 20 bp to about 360 bp, from about 20 bp to about 250 bp, from about 50 bp to about 225 bp, from about 75 bp to about 210 bp, such as a 92 bp repeat and a 97 bp repeat, from about 100 bp to about 205 bp, from about 125 bp to about 200 bp, from about 150 bp to about 195 bp, from about 160 bp to about 190 and from about 170 bp to about 185 bp including about 180 bp. The length of the repeat can also be about 100 to 210 bp; such as 100, 194, and 210 bp. The length of the repeat can also include larger sequences, from about 300 bp to about 10 kb, from about 1 kb to 9 kb, from about 2 kb to about 8 kb, from about 3 kb to about 7 kb, from about 4 kb to about 8 kb, including, for example, 982 bp, 2836 bp, 5788 bp and 8308 bp.

[0117] Modification of Centromeres Isolated from Native Plant Genome

[0118] Modification and changes can be made in the centromeric DNA segments of the current invention and still obtain a functional molecule with desirable characteristics. The following is a discussion based upon changing the nucleic acids of a centromere to create an equivalent, or even an improved, second generation molecule.

[0119] In particular embodiments of the invention, mutated centromeric sequences are contemplated to be useful for increasing the utility of the centromere. It is specifically contemplated that the function of the centromeres of the current invention can be based in part or in whole upon the secondary structure of the DNA sequences of the centromere, modification of the DNA with methyl groups or other adducts, and/or the proteins that interact with the centromere. By changing the DNA sequence of the centromere, one can alter the affinity of one or more centromere-associated protein(s) for the centromere and/or the secondary structure or modification of the centromeric sequences, thereby changing the activity of the centromere. Alternatively, changes can be made in the centromeres that do not affect the activity of the centromere. Changes in the centromeric sequences that reduce the size of the DNA segment needed to confer centromere activity are particularly useful, as are changes that increase the fidelity with that the centromere is transmitted during mitosis and meiosis.

[0120] Modification of Centromeres by Passage Through Bacteria, Plant or Other Hosts or Processes

[0121] In the methods of the present invention, the resulting MC DNA sequence can also be a derivative of the parental clone or centromere clone having substitutions, deletions, insertions, duplications and/or rearrangements of one or more nucleotides in the nucleic acid sequence. Such nucleotide mutations can occur individually or consecutively in stretches of 1, 2, 3, 4, 5, 6, 7, 8, 9, 10, 20, 40, 50, 60, 70, 80, 90, 100, 150, 200, 300, 400, 500, 800, 1000, 2000, 4000, 8000, 10000, 50000, 100000, and about 200000, including all ranges in-between. Variations of MCs can arise through passage of MCs through various hosts including virus, bacteria, yeast, plant or other prokaryotic or eukaryotic organism and can occur through passage of multiple hosts or individual host. Variations can also occur by replicating the MC in vitro. Variations can also be specifically engineered into the MC using standard molecular biology techniques.

### D. Exemplary Exogenous Nucleic Acids Including Plant-Expressed Genes and Regulatory Elements

[0122] Of particular interest in the present invention are exogenous nucleic acids that when introduced into plants alter the phenotype of the plant, a plant organ, plant tissue, or portion of the plant. Such exogenous nucleic acids can be delivered on MCs. Exemplary exogenous nucleic acids encode polypeptides involved in one or more important biological properties in plants. Other exemplary exogenous nucleic acids alter expression of exogenous or endogenous genes, either increasing or decreasing expression, optionally in response to a specific signal or stimulus. Other exemplary exogenous nucleic acids encode polypeptides that produce a trait in the plant that is not found in the plant before the introduction of the exogenous nucleic acid.

[0123] One of the major purposes of transformation of crop plants is to add some commercially desirable, agronomically important traits to the plant. Such traits include herbicide resistance or tolerance; insect (pest) resistance or tolerance; nematode resistance, disease resistance or tolerance (viral, bacterial, fungal, or other pathogens); stress tolerance and/or resistance, as exemplified by resistance or tolerance to drought, heat, chilling, freezing, excessive moisture, salt stress, mechanical stress, extreme acidity, alkalinity, toxins, UV light, ionizing radiation or oxidative stress; increased yields, whether in quantity or quality; enhanced or altered nutrient acquisition and enhanced or altered metabolic efficiency; enhanced or altered nutritional content (including altered gossypol levels) and makeup of plant tissues used for food, feed, fiber or processing; physical appearance; male sterility; drydown; standability; prolificacy; altered geographical range; altered day-length tolerance; starch quantity and quality; oil quantity and quality; protein quality and quantity; amino acid composition; modified chemical production; altered pharmaceutical or nutraceutical properties; altered bioremediation properties; increased biomass; altered growth rate; altered fitness; altered biodegradability; altered CO₂ fixation; presence of bioindicator activity; altered digestibility by humans or animals; altered allergenicity; altered mating characteristics; altered pollen dispersal; improved environmental impact; altered nitrogen fixation capability; the production of a pharmaceutically active protein; the production of a small molecule with medicinal properties; the production of a chemical including those with industrial utility; the production of fibers including those used in making clothing, towels, bedding, wall coverings, upholstery, draperies, textiles, yarn, thread, wicks, string, paper, medical bandages, cotton balls, cotton batting, cotton swabs, cotton wool, gauze, tampons and other femine hygine products, cellulose products (e.g. rayon, plastics, photographic film, and cellophane), tarps and other industrial materials; the production of nutraceuticals, food additives, carbohydrates, RNAs, lipids, fuels, dyes, pigments, vitamins, scents, flavors, vaccines, antibodies, hormones, and the like; and alterations in plant architecture or development, including changes in developmental timing, photosynthesis, signal transduction, cell growth, reproduction, or differentiation. Additionally one could create a library of an entire genome from any organism or organelle including mammals, plants, microbes, fungi, or bacteria, represented on MCs.

[0124] A modified plant can exhibit increased or decreased expression or accumulation of a product that can be a natural product of the plant or a new or altered product. Examples of products include enzymes, RNA molecules, nutritional proteins, structural proteins, amino acids, lipids, fatty acids, polysaccharides, sugars, alcohols, alkaloids, carotenoids, propanoids, phenylpropanoids, terpenoids, steroids, flavonoids, phenolics, anthocyanins, pigments, vitamins or plant hormones. The modified plant can have enhanced or diminished requirements for light, water, nitrogen, or trace elements. Modified plant can also have an enhanced ability to capture or fix nitrogen from its environment. Modified plants are enriched for an essential amino acid as a proportion of a protein fraction of the plant. The protein fraction can be, for example, total seed protein, soluble protein, insoluble protein, water-extractable protein, and lipid-associated protein. The modification can include overexpression, underexpression, antisense modulation, sense suppression, induciblc expression, inducible repression, or inducible modulation of a gene.

[0125] A brief summary of exemplary improved properties and polypeptides of interest for either increased or decreased expression is provided below.

[0126] Herbicide Resistance

[0127] A herbicide resistance (or tolerance) trait is a characteristic of a modified plant that is resistant to dosages of an herbicide that is typically lethal to a non-modified plant. Exemplary herbicides useful in a plant include members of the following families of herbicides: Acetamide, Amide, Arylaminopropionic acid, Aryloxyphenoxy-propionate, Benzamide, Benzofuran, Benzoic acid, Benzothiadiazinone, Bialaphos, Bipyridylium, Carbamate, Chloroacetamide, Chloro-Carbonic-acid, Chlorophenoxy acid, Dinitroaniline, Dinitrophenol, Diphenylether, Glufosinate, Glycine, Glyphosate, Imidazolinone, Isoxazole, Isoxazolidinone, Nitrile, N-phenylphthalimide, Organoarsenical, Oxadiazole, Oxazolidinedione, Oxyacetamide, Oxynil, Phenoxy-carboxylic-acid, Phenyl-carbamate, Phenylpyrazole, Phenylpyrazoline, Phenyl-pyridazine, Phosphinic acid, Phosphinothricin, Phosphoroamidate, Phosphorodithioate, Phthalamate Semicarbazone, Pyrazole, Pyrazolium, Pyridazinone, Pyridine, Pyridine carboxylic acid, Pyridinecarboxamide, Pyrimidindione, Pyrimidinyl(thio)benzoate, Quinoline carboxylic acid, Sulfonamide, Sulfonylaminocarbonyl-triazolinone, Sulfonylurea, Tetrazolinone, Thiadiazole, Thiocarbamate, Triazine, Triazinone, Triazole, Triazolinone, Triazolocarboxamide, Triazolopyrimidine, Triketone, Uracil or Urea herbicides. MCs carrying resistance genes to one or more of these herbicides are anticipated. Other herbicide resistance genes would be useful as would combinations of herbicide resistance genes on the same MC.

[0128] The genes encoding phosphinothricin acetyltransferase (bar), glyphosate tolerant EPSP synthase genes, glyphosate acetyltransferase, the glyphosate degradative enzyme gene gox encoding glyphosate oxidoreductase, deh (encoding a dehalogcnase enzyme that inactivates dalapon), herbicide resistant (e.g., sulfonylurea and imidazolinone) acetolactate synthase, and bxn genes (encoding a nitrilase enzyme that degrades bromoxynil) are good examples of herbicide resistant genes for use in transformation. The bar gene codes for an enzyme, phosphinothricin acetyltransferase (PAT), that inactivates the herbicide phosphinothricin and prevents this compound from inhibiting glutamine synthetase enzymes. The enzyme 5-enolpyruvylshikimate-3-phosphate synthase (EPSP Synthase), is normally inhibited by the herbicide N (phosphonomethyl) glycine (glyphosate). However, genes are known that encode glyphosate resistant EPSP synthase enzymes. These genes are particularly contemplated for use in plant transformation. The deh gene encodes the enzyme dalapon dehalogenase and confers resistance to the herbicide dalapon. The bxn gene codes for a specific nitrilase enzyme that converts bromoxynil to a non herbicidal degradation product. The glyphosate acetyl transferase gene inactivates the herbicide glyphosate and prevents this compound from inhibiting EPSP synthase.

[0129] Polypeptides that can produce plants having tolerance to plant herbicides include polypeptides involved in the shikimate pathway, that are of interest for providing glyphosate tolerant plants. Such polypeptides include polypeptides involved in biosynthesis of chorismate, phenylalanine, tyrosine and tryptophan.

[0130] Insect Resistance

[0131] Potential insect resistance (or tolerance) genes that can be introduced include Bacillus thuringiensis crystal toxin genes or Bt genes (Watrud 1985). Bt genes can provide resistance to lepidopteran or coleopteran pests such as European Corn Borer (ECB). Examples of Bt toxin genes include the CryIA(b) and CryIA(c) genes. Endotoxin genes from other species of B. thuringiensis that affect insect growth or development also can be used.

[0132] Bt genes for use in the MCs can be modified to increase expression in plants. Means for preparing synthetic genes are well known in the art. Examples of modified Bt toxin genes include a synthetic Bt CryIA(b) gene (Perlak et al., 1991), and the synthetic CryIA(c) gene termed 1800b (WO95/06128). Some examples of other Bt toxin genes known to those of skill in the art are given in Table 1.

TABLE 1
Examples of Bt toxin genes

| Gene | GenBank Accession |
|---|---|
| Cry1Aa | M11250 |
| Cry1Ab | M13898 |
| Cry1Ac | MI 1068 |
| Cry 1 Ad | M73250 |
| Cry1Ae | M65252 |
| Cry1Ba | X06711 |
| Cry1Bb | L32020 |
| Cry1Bc | Z46442 |
| Cry1Bd | U70726 |
| Cry1Ca | X07518 |
| Cry1Cb | M97880 |
| Cry1Da | X54160 |
| Cry1Db | Z22511 |
| Cry1Ea | X53985 |
| Cry1Eb | M73253 |
| Cry1Fa | M63897 |
| Cry1Fb | Z22512 |
| Cry1Ga | Z22510 |
| Cry1Gb | U70725 |
| Cry1Ha | Z22513 |
| Cry1Hb | U35780 |
| Cry1Ha | X62821 |
| Cry1Ib | U07642 |
| Cry1Ja | L32019 |
| Cry1Jb | U31527 |
| Cry1K | U28801 |
| Cry2Aa | M31738 |
| Cry2Ab | M23724 |
| Cry2Ac | X57252 |
| Cry3A | M22472 |
| Cry3Ba | X17123 |
| Cry3Bb | M89794 |
| Cry3C | X59797 |
| Cry4A | Y00423 |
| Cry4B | X07423 |
| Cry5Aa | L07025 |
| Cry5Ab | L07026 |
| Cry6A | L07022 |
| Cry6B | L07024 |
| Cry7Aa | M64478 |
| Cry7Ab | U04367 |
| CrySA | U04364 |
| CrySB | U04365 |
| Cry8C | U04366 |
| Cry9A | X58120 |
| Cry9B | X75019 |
| Cry9C | Z37527 |
| Cry10A | M12662 |
| Cry11A | M31737 |
| Cry12B | X86902 |
| Cry12A | L07027 |
| Cry13A | L07023 |
| Cry14A | U13955 |
| Cry15A | M76442 |
| Cry16A | X94146 |
| Cry17A | X99478 |
| Cry18A | X99049 |
| Cry19A | Y0S920 |
| Cyt1Aa | X03182 |
| Cyt1Ab | X98793 |
| Cyt2A | Z14147 |
| Cyt2B | U52043 |

[0133] Protease inhibitors also can provide insect resistance (Johnson et al., 1989) and can also be used. The use of a protease inhibitor II gene, pinII, from tomato or potato is particularly useful, especially when used in combination with a Bt toxin gene, because the combined effect has synergistic insecticidal activity. Other genes that encode inhibitors of the insect's digestive system, or those that encode enzymes or co-factors that facilitate the production of inhibitors, are also useful, such as oryzacystatin and amylase inhibitors from wheat and barley. Several amylase inhibitor genes have been isolated from plants and some have been introduced as exogenous nucleic acids, conferring an insect resistant phenotype that is useful (Chrispeels, Sadava et al. 2003).

[0134] Genes encoding lectins can confer additional or alternative insecticide properties. Lectins are multivalent carbohydrate binding proteins that have the ability to agglutinate red blood cells from a range of species. Lectins have been identified recently as insecticidal agents with activity against weevils, ECB and rootworm (Murdock et al., Phytochemistry, 29:85-89, 1990, (Murdock, Huesing et al. 1990; Czapla and Lang 1991). Lectin genes contemplated to be useful include, for example, barley and wheat germ agglutinin (WGA) and rice lectins (Gatehouse, Dewey et al. 1984).

[0135] Genes controlling the production of large or small polypeptides active against insects when introduced into the insect pests, such as lytic peptides, peptide hormones and toxins and venoms can also be delivered on MCs. For example, the expression of juvenile hormone esterase, directed towards specific insect pests, can result in insecticidal activity, or halt metamorphosis (Hammock, Bonning et al. 1990).

[0136] Genes that encode enzymes that affect the integrity of the insect cuticle can also be used. Such genes include those encoding, e.g., chitinase, proteases, lipases and also genes for the production of nikkomycin, a compound that inhibits chitin synthesis, the introduction of any one of these can produce insect resistant plants. Genes that code for activities that affect insect molting, such as those effecting the production of ecdysteroid UDP glucosyltransferase, can also be used.

[0137] Genes that code for enzymes that facilitate the production of compounds that reduce the nutritional quality of the host plant to insect pests can also be used. Insecticidal activity can be conferred on a plant by altering its sterol composition. Alterations in plant sterol composition by expression of genes that directly promote the production of undesirable sterols or those that convert desirable sterols into undesirable forms can have a negative effect on insect growth and/or development. Lipoxygenases are naturally occurring plant enzymes that have been shown to exhibit anti nutritional effects on insects and to reduce the nutritional quality of their diet.

[0138] Tripsacum dactyloides is a species of grass that is resistant to certain insects, including corn root worm. Genes isolated from Tripsacum that confers insect resistance can be delivered on MCs.

[0139] Further, genes encoding proteins characterized as having potential insecticidal activity also can be used as exogenous nucleic acids. Such genes include, for example, the cowpea trypsin inhibitor (CpTI; (Hilder, Gatehouse et al. 1987)) that can be used as a rootworm deterrent; genes encoding avermectin ((Campbell, 1989; Ikeda et al., 1987) that can prove particularly useful as a corn rootworm deterrent; ribosome inactivating protein genes; and genes that regulate plant structures. Modified plants including anti-insect antibody genes and genes that code for enzymes that can convert a non toxic insecticide (pro insecticide) applied to the outside of the plant into an insecticide inside the plant also are contemplated.

[0140] Polypeptides that can improve plant tolerance to the effects of plant pests or pathogens include proteases, polypeptides involved in anthocyanin biosynthesis, polypeptides involved in cell wall metabolism, including cellulases, glucosidases, pectin methyl esterase, pectinase, polygalacturonase, chitinase, chitosanase, and cellulose synthase, and polypeptides involved in biosynthesis of terpenoids or indole for production of bioactive metabolites to provide defense against herbivorous insects.

[0141] Vegetative Insecticidal Proteins (VIP) are a class of proteins originally found to be produced in the vegetative growth phase of the bacterium, Bacillus cereus, but do have a spectrum of insect lethality similar to the insecticidal genes found in strains of Bacillus thuriengensis. Both the vip1a and vip3A genes have been isolated and have demonstrated insect toxicity (Chrispeels, Sadava et al. 2003).

[0142] In cotton, genes that control the following pests are advantageous, including: Agrotis ipsilon (black cutworm), Anthonomous grandis grandis (boll weevil), Aphis craccivora (cowpea aphid), Aphis gossypii (cotton aphid), Creontiades dilutes, Dysdercus Koenigii (cotton stainer), Feltia subterranean (granulate cutworm), Frankliniella exigua (thrips), Frankliniella fusca (tobacco thrips), Frankliniella tritici (flower thrips), Franliniella schultzei (thrips), Helicoverpa armigera, Helicoverpa punctigera, Heliothis virescens (tobacco budworm), Heliothis zea (bollworm), Lepidoptera larvae, Lygus lineolaris (Tarnished Plant Bug), Peridroma saucia (variegated cutworm), Sericothrips variabilis (soybean thrips), Spodoptera exigua (beet armyworm), Spodoptera frugiperda (fall armyworm), Spodoptera ornithogalli (yellow-striped armyworm), Tetranchus spider mites, Tetranchus ludeni, Tetranchus urticae, Tetranhcus lambi, Tetranychus urticae (two-spotted spider mite), Thrips tabaci (onion thrips), and Trichoplusia ni (cabbage looper).

[0143] Environment or Stress Resistance

[0144] Improvement of a plant's ability to tolerate various environmental stresses such as drought, excess moisture, chilling, freezing, high temperature, salt, and oxidative stress, can also be effected through expression of exogenous genes. Benefits can be realized in terms of increased resistance to freezing temperatures through the introduction of an antifreeze protein. Improved chilling tolerance also can be conferred through increased expression of glycerol 3 phosphate acetyltransferase in chloroplasts (Wolter, Schmidt et al. 1992). Resistance to oxidative stress (often exacerbated by conditions such as chilling temperatures in combination with high light intensities) can be conferred by expression of superoxide dismutase, and can be improved by glutathione reductase (Bowler, Montagu et al. 1982). Such strategies can allow for tolerance to freezing in newly emerged fields as well as extending later maturity higher yielding varieties to earlier relative maturity zones.

[0145] The expression of novel genes that favorably effect plant water content, total water potential, osmotic potential, or turgor can enhance the ability of the plant to tolerate drought. “Drought resistance” and “drought tolerance” refer to a plant's increased resistance or tolerance to stress induced by a reduction in water availability, as compared to normal circumstances, and the ability of the plant to function and survive in lower water environments. The expression of genes encoding for the biosynthesis of osmotically active solutes, such as polyol compounds, can impart protection against drought. Within this class are genes encoding for mannitol-1 phosphate dehydrogenase (Lee and Saier 1983) and trehalose-6-phosphate synthase (Kaasen et al., 1992; Tarczynski et al., 1993).

[0146] The efficacy of other metabolites can protect enzyme function (e.g., alanopine or propionic acid) or membrane integrity (e.g., alanopine) (Loomis, Carpenter et al. 1989), and therefore expression of genes encoding for the biosynthesis of these compounds can confer drought resistance in a manner similar to or complimentary to mannitol. Other examples of naturally occurring metabolites that are osmotically active and/or provide some direct protective effect during drought and/or desiccation include fructose, erythritol, sorbitol, dulcitol, glucosylglycerol, sucrose, stachyose, raffinose, proline, glycine betaine, ononitol and pinitol.

[0147] The expression of specific proteins also can increase drought tolerance. The Type II Late Embryogenic Abundant (LEA) proteins (dehydrin type) have been implicated in drought and/or desiccation tolerance in vegetative plant parts (e.g., (Yamaguchi-Shinozaki, Kozumi et al. 1992)). Expression of a Type III LEA (HVA 1) in tobacco was found to influence plant height, maturity and drought tolerance (Fitzpatrick 1989). In rice, expression of the HVA 1 gene influenced tolerance to water deficit and salinity (Xu, Duan et al. 1996). Expression of structural genes from any of the three LEA groups can therefore confer drought tolerance. Other types of proteins induced during water stress include thiol proteases, aldolases or transmembrane transporters (Guerrero, Jones et al. 1990), that can confer various protective and/or repair type functions during drought stress. It also is contemplated that genes that effect lipid biosynthesis can also be useful in conferring drought resistance on the plant.

[0148] Many of these genes also improve freezing tolerance (or resistance); the physical stresses incurred during freezing and drought are similar in nature and can be mitigated in similar fashion. Benefit can be conferred via constitutive expression of these genes, but a useful means of expressing these genes can be through the use of a turgor induced promoter (Guerrero, Jones et al. 1990). Spatial and temporal expression patterns of these genes can enable plants to better withstand stress.

[0149] Expression of genes involved with specific morphological traits that allow for increased water extractions from drying soil can also be used. For example, introduction and expression of genes that alter root characteristics can enhance water uptake. Expression of genes that enhance reproductive fitness during times of stress are also useful, such as expression of genes that improve the synchrony of pollen shed and receptiveness of the female flower parts, e.g., silks. Expression of genes that minimize flower abortion during times of stress would increase the amount of cotton to be harvested and hence be of value.

[0150] Given the overall role of water in determining yield, it is contemplated that enabling plants to use water more efficiently, through the introduction and expression of exogenous genes, can improve overall performance even when soil water availability is not limiting. By introducing genes that improve the ability of plants to maximize water usage across a full range of stresses relating to water availability, yield stability or consistency of yield performance can be realized.

[0151] Polypeptides that can improve stress tolerance under a variety of stress conditions include those polypeptides involved in gene regulation, such as serine/threonine-protein kinases, MAP kinases, MAP kinase kinases, and MAP kinase kinase kinases; polypeptides that act as receptors for signal transduction and regulation, such as receptor protein kinases; intracellular signaling proteins, such as protein phosphatases, GTP binding proteins, and phospholipid signaling proteins; polypeptides involved in arginine biosynthesis; polypeptides involved in ATP metabolism, including for example ATPase, adenylate transporters, and polypeptides involved in ATP synthesis and transport; polypeptides involved in glycine betaine, jasmonic acid, flavonoid or steroid biosynthesis; and hemoglobin. Enhanced or reduced activity of such polypeptides in modified plants will provide changes in the ability of a plant to respond to a variety of environmental stresses, such as chemical stress, drought stress and pest stress.

[0152] Other polypeptides that can improve plant tolerance to cold or freezing temperatures include polypeptides involved in biosynthesis of trehalose or raffinose, polypeptides encoded by cold induced genes, fatty acyl desaturases and other polypeptides involved in glycerolipid or membrane lipid biosynthesis, that find use in modification of membrane fatty acid composition, alternative oxidase, calcium-dependent protein kinases, LEA proteins or uncoupling protein.

[0153] Other polypeptides that can improve plant tolerance to heat include polypeptides involved in biosynthesis of trehalose, polypeptides involved in glycerolipid biosynthesis or membrane lipid metabolism (for altering membrane fatty acid composition), heat shock proteins or mitochondrial NDK.

[0154] Other polypeptides that can improve tolerance to extreme osmotic conditions include polypeptides involved in proline biosynthesis.

[0155] Other polypeptides that can improve plant tolerance to drought conditions include aquaporins, polypeptides involved in biosynthesis of trehalose or wax, LEA proteins or invertase.

[0156] Disease Resistance

[0157] Increased resistance (or tolerance) to diseases caused by viruses, viroids, bacteria, fungi and nematodes, as well as mycotoxin-producing organisms, can be realized through the introduction of exogenous genes. Resistance can be affected through suppression of endogenous factors that encourage disease-causing interactions, expression of exogenous factors that are toxic to or otherwise provide protection from pathogens, or expression of factors that enhance the plant's own defense responses.

[0158] Resistance to viruses can be produced through expression of novel genes. For example, expression of a viral coat protein in a modified plant can impart resistance to infection of the plant by that virus and perhaps other closely related viruses (Abel, Nelson et al. 1986). Expression of antisense genes targeted at essential viral functions can also impart resistance to viruses. Further, resistance to viruses can be realized through other approaches, including the use of satellite viruses.

[0159] Increased resistance to diseases caused by bacteria and fungi can be realized through introduction of exogenous genes. “Peptide antibiotics,” pathogenesis related (PR) proteins, toxin resistance, or proteins effecting host pathogen interactions such as morphological characteristics are useful. Peptide antibiotic genes are induced following pathogen attack on a host plant and have been divided into at least 5 classes of proteins. Included amongst the PR proteins are beta 1,3 glucanases, chitinases, and osmotin and other proteins that are believed to function in plant resistance to disease organisms. Other genes have been identified that have antifungal properties, e.g., UDA (stinging nettle lectin), or hevein. Certain plant diseases are caused by the production of phytotoxins; introduction of an exogenousgene that encodes an enzyme capable of degrading or otherwise inactivating the phytotoxin can confer resistance. Exogenous genes that alter the interactions between host plant and pathogen can be useful to reduce the ability of the disease organism to invade the tissues of the host plant, e.g., an increase in the waxiness of the leaf cuticle or other morphological characteristics.

[0160] Polypeptides useful for imparting improved disease responses to plants include polypeptides encoded by cercosporin-induced genes, antifungal proteins and proteins encoded by R-genes or SAR genes.

[0161] Agronomically important diseases caused by fungal phytopathogens include anthracnose, arcolate mildew, boll rot, charcoal rot, fusarium wilt, rust, sclerotium stem rot, black root rot, Ascochyta blight or ashen spot, leaf blight and spot, wilt, sheath blight, stem canker, or root rot.

[0162] Exemplary plant viruses include tobacco or cucumber mosaic virus, ringspot virus, necrosis virus, and maize dwarf mosaic virus. Specific animal, fungal, protist, bacterial, and viral pathogens of major crops include, in cotton, Verticillium dahliae, Fusarium moniliforme, Fusarium roseum, Fusarium oxysporum, Phomopsis sp., Cladosporium sp., Alternaria alternate, Alternaria macrospora, Glomerella gossypii, Glomerella cingulata, Hoplolaimus columbus, Ascochyta gossypii, Phyophthora capsici, Diplodia gossypina, Mycosphaerella areola, Salmonia malachrae, Leveillula taurica, Thielaviopsis basicola, Chalara elegans, Lasiodiplodia theobromae, Phymatotrichum omnivorum, Sclerotium rolfsii, Macrophomina phaseolina, Puccinia cacabata, Puccinia schedonnardi, Phoma exigua, Phakopsora gossypii, Pythium aphanidermatum, Pythium ultimum, Pythium debaryanum, Pythium heterothallicum, Pythium irregulare, Pythium polytylum, Pythium splendens, Pythium sylvaticum, Pythiumultimum, Verticullium dahliae, Colletotrichum gossypii, Rhizoctonia solani, Rhizopus oryzae, Geminiviruses such as leaf crumple virus and leaf curl virus, Cotton mosaic virus, Rotylenchulus reniformis (Reniform nematode), Meloidogyne incognita (Root knot nematode), Belonolaimus longicaudatus (sting nematode), Cochliobolus spicifer, Myrothecium roridum, Nigrospora oryzae, Xanthomonas campestris pv malvacearum, Nematospora spp. Aspergillus sp., Phomopsis sp., Cercospora sp., Stemphyllium sp., Phymatotrichopsis omnivore.

[0163] Plant Agronomic Characteristics

[0164] Two of the factors determining where crop plants can be grown are the average daily temperature during the growing season and the length of time between frosts. Within the areas where it is possible to grow a particular crop, there are varying limitations on the maximal time it is allowed to grow to maturity and be harvested. For example, a variety to be grown in a particular area is selected for its ability to mature and dry down to harvestable moisture content within the required period of time with maximum possible yield. Therefore, crops of varying maturities are developed for different growing locations. Apart from the need to dry down sufficiently to permit harvest, it is desirable to have maximal drying take place in the field to minimize the amount of energy required for additional drying post harvest. Also, the more readily a product can dry down, the more time there is available for growth and mature development. Genes that influence maturity and/or dry down can be identified and introduced into plant lines using transformation techniques to create new varieties adapted to different growing locations or the same growing location, but having improved yield to moisture ratio at harvest. Expression of genes that are involved in regulation of plant development can be especially useful.

[0165] IGenes can be introduced into plants that can improve standability and other plant growth characteristics. Expression of exogenous genes in plants that confer stronger stems, improved root systems, or prevent or reduce boll loss or shattering are especially attractive to farmers. Iintroduction and expression of genes that increase the total amount of photoassimilate available by, for example, increasing light distribution and/or interception is advantageous. In addition, the expression of genes that increase the efficiency of photosynthesis and/or the leaf canopy can further increase gains in productivity. Expression of a phytochrome gene in crop plants can be advantageous. Expression of such a gene can reduce apical dominance, confer semidwarfism on a plant, or increase shade tolerance (U.S. Pat. No. 5,268,526). Such approaches would allow for increased plant populations in the field.

[0166] Nutrient Utilization

[0167] The ability to utilize available nutrients can be a limiting factor in growth of crop plants. Nutrient uptake, ability to tolerate pH extremes, nutrient mobilization through the plant, nutrient storage pools, and availability for metabolic activities can be altered by the introduction of exogenous genes. An increase in the activity of, for example, an enzyme that is normally present in the plant and involved in nutrient utilization can increase the availability of a nutrient or decrease the availability of an antinutritive factor. An example of such an enzyme is phytase. Enhanced nitrogen utilization by a plant is desirable. Expression of a glutamatc dehydrogenase gene in plants, e.g., E. coli gdhA genes, can lead to increased fixation of nitrogen in organic compounds. Furthermore, expression of gdhA in plants can lead to enhanced resistance to the herbicide glufosinate by incorporation of excess ammonia into glutamate, thereby detoxifying the ammonia. Expression of a novel gene can make a nutrient source available that was previously not accessible, e.g., an enzyme that releases a component of nutrient value from a more complex molecule.

[0168] Genes encoding polypeptides for improving nitrogen flow, sensing, uptake, storage and/or transport include those involved in aspartate, glutamine or glutamate biosynthesis, polypeptides involved in aspartate, glutamine or glutamate transport, polypeptides associated with the TOR (Target of Rapamycin) pathway, nitrate transporters, nitrate reductascs, amino transferases, ammonium transporters, chlorate transporters or polypeptides involved in tetrapyrrole biosynthesis are useful to include on MCs.

[0169] Genes encoding polypeptides for increasing the rate of photosynthesis include phytochrome, ribulose bisphosphate carboxylase-oxygenase, Rubisco activase, photosystem I and II proteins, electron carriers, ATP synthasc, NADH dehydrogenase or cytochrome oxidase are useful to deliver via MCs.

[0170] Genes encoding polypeptides for increasing phosphorus uptake, transport or utilization include phosphatases or phosphate transporters are also useful to include on MCs.

[0171] Male Sterility

[0172] Male sterility is useful in the production of hybrid seed. Male sterility can be produced through expression of exogenous genes. For example, expression of genes that encode proteins, RNAs, or peptides that interfere with development of the male inflorescence and/or gametophyte result in male sterility. Chimeric ribonuclease genes that express in the anthers of transgenic tobacco and oilseed rape lead to male sterility (Mariani, Beuckeleer et al. 1990).

[0173] A number of maize mutations confer cytoplasmic male sterility. One mutation, T cytoplasm, also correlates with sensitivity to Southern corn leaf blight. A DNA sequence, designated TURF 13 (Levings 1990), correlates with T cytoplasm. By delivery TURF 13 on a MC, to separate male sterility from disease sensitivity. As it is necessary to be able to restore male fertility for breeding purposes and for grain production, it is proposed that genes encoding restoration of male fertility also can be introduced. Similar cytoplasmic male sterility systems are know in cotton (Liu, Guo et al. 2003).

[0174] Altered Nutritional Content

[0175] Genes can be introduced into plants to improve or alter the nutrient quality or content of a particular crop. Introduction of genes that alter the nutrient composition of a crop can greatly enhance the feed or food value. For example, the protein of many crops is suboptimal for feed and food purposes, especially when fed to pigs, poultry, and humans. The protein is deficient in several amino acids that are essential in the diet of these species, requiring the addition of supplements to the grain. Limiting essential amino acids can include lysine, methionine, tryptophan, threonine, valine, arginine, and histidine. Some amino acids become limiting only after the crop is supplemented with other inputs for feed formulations. The levels of these essential amino acids in seeds and grain can be elevated by mechanisms that include the introduction of genes to increase the biosynthesis of the amino acids, decrease the degradation of the amino acids, increase the storage of the amino acids in proteins, or increase transport of the amino acids to the seeds or grain.

[0176] Polypeptides useful for providing increased seed protein quantity and/or quality include those involved in the metabolism of amino acids in plants, particularly polypeptides involved in biosynthesis of methionine/cysteine and lysine, amino acid transporters, amino acid efflux carriers, seed storage proteins, proteases, or polypeptides involved in phytic acid metabolism.

[0177] The protein composition of a crop can be altered to improve the balance of amino acids in a variety of ways including elevating expression of native proteins, decreasing expression of those with poor composition, changing the composition of native proteins, or introducing genes encoding entirely new proteins possessing superior composition.

[0178] The introduction of genes that alter the oil content of a crop plant can also be of value. Increases in oil content can result in increases in metabolizable-energy-content and density of the seeds for use in feed and food. The introduced genes can encode enzymes that remove or reduce rate-limitations or regulated steps in fatty acid or lipid biosynthesis. Such genes can include those that encode acetyl-CoA carboxylase, ACP-acyltransferase, alpha-ketoacyl-ACP synthase, or other well known fatty acid biosynthetic activities. Other possibilities are genes that encode proteins that do not possess enzymatic activity such as acyl carrier protein. Genes can be introduced that alter the balance of fatty acids present in the oil providing a more healthful or nutritive feedstuff. The introduced DNA also can encode sequences that block expression of enzymes involved in fatty acid biosynthesis, altering the proportions of fatty acids present in crops.

[0179] Genes can be introduced that enhance the nutritive value of crops, or of foods derived from crops by increasing the level of naturally occurring phytosterols, or by encoding for proteins to enable the synthesis of phytosterols in crops. The phytosterols from these crops can be processed directly into foods, or extracted and used to manufacture food products.

[0180] Genes can be introduced that enhance the nutritive value of the starch component of crops, for example by increasing the degree of branching, resulting in improved utilization of the starch in livestock by delaying its metabolism. Additionally, other major constituents of a crop can be altered, including genes that affect a variety of other nutritive, processing, or other quality aspects. For example, pigmentation can be increased or decreased.

[0181] Carbohydrate metabolism can be altered, for example by increased sucrose production and/or transport. Polypeptides useful for affecting carbohydrate metabolism include polypeptides involved in sucrose or starch metabolism, carbon assimilation or carbohydrate transport, including, for example sucrose transporters or glucose/hexose transporters, enzymes involved in glycolysis/gluconeogenesis, the pentose phosphate cycle, or raffinose biosynthesis, or polypeptides involved in glucose signaling, such as SNF1 complex proteins.

[0182] Feed or food crops can also possess sub-optimal quantities of vitamins, antioxidants or other nutraceuticals, requiring supplementation to provide adequate nutritive value and ideal health value. Introduction of genes that enhance vitamin biosynthesis can be envisioned including, for example, vitamins A, E, B12, choline, or the like. Mineral content can also be sub-optimal. Thus genes that affect the accumulation or availability of compounds containing phosphorus, sulfur, calcium, manganese, zinc, or iron among others would be valuable.

[0183] Numerous other examples of improvements of crops can be used with the invention. The improvements do not necessarily involve fiber, but can, for example, improve the value of a crop for silage. Introduction of DNA to accomplish this include sequences that alter lignin production such as those that result in the “brown midrib” phenotype associated with superior feed value for cattle. Other genes can encode for enzymes that alter the structure of extracellular carbohydrates in the stover, or that facilitate the degradation of the carbohydrates in the silage portion of the crop so that it can be efficiently fermented into ethanol or other useful carbohydrates.

[0184] Modifying the nutritional content of plants can also be useful, such as reducing undesirable components, including fats, starches, etc. This can be done, for example, by the use of exogenous nucleic acids that encode enzymes that increase plant use or metabolism of such components so that they are present at lower quantities. Alternatively, it can be done by use of exogenous nucleic acids that reduce expression levels or activity of native plant enzymes that synthesize such components.

[0185] Likewise the elimination of certain undesirable traits can improve the food or feed value of the crop. Many undesirable traits must currently be eliminated by special post-harvest processing steps and the degree to that these can be engineered into the plant prior lo harvest and processing would provide significant value. Examples of such traits are the elimination of anti-nutritionals such as phytates, gossypol and other phenolic compounds that are commonly found in many crop species. Also, the reduction of fats, carbohydrates and certain phyto-hormones can be valuable for the food and feed industries as they can allow a more efficient mechanism to meet specific dietary requirements.

[0186] In addition to direct improvements in feed or food value, genes also can be introduced that improve the processing of crops and improve the value of the products resulting from the processing. Processing steps can include mechanical harvesting, stripping, ginning, milling and wet-milling. Thus novel genes that increase the efficiency and reduce the cost of such processing can also find use. Improving the value of processing products can include altering the quantity or quality of starch, oil, gluten meal, or the components of gluten feed. Elevation of starch can be achieved through the identification and elimination of rate limiting steps in starch biosynthesis by expressing increased amounts of enzymes involved in biosynthesis or by decreasing levels of the other components of crops resulting in proportional increases in starch.

[0187] Oil, such as cottonseed oil, can be improved by introduction and expression of genes. Oil properties can be altered to improve its performance in the production and use of cooking oil, shortenings, lubricants or other oil-derived products or improvement of its health attributes when used in the food-related applications. Novel fatty acids also can be synthesized that upon extraction can serve as starting materials for chemical syntheses. The changes in oil properties can be achieved by altering the type, level, or lipid arrangement of the fatty acids present in the oil. This in turn can be accomplished by the addition of genes that encode enzymes that catalyze the synthesis of novel fatty acids (e.g., fatty acid clongascs, desaturases) and the lipids possessing them or by increasing levels of native fatty acids while reducing levels of precursors or breakdown products. Alternatively, DNA sequences can be introduced that slow or block steps in fatty acid biosynthesis resulting in the increase in precursor fatty acid intermediates. Genes that might be added include desaturases, epoxidases, hydratases, dehydratases, or other enzymes that catalyze reactions involving fatty acid intermediates. Representative examples of catalytic steps that might be blocked include the desaturations from stearic to oleic acid or oleic to linolenic acid resulting in the respective accumulations of stearic and oleic acids. Another example is the blockage of elongation steps resulting in the accumulation of C8 to C12 saturated fatty acids.

[0188] Genes encoding polypeptides useful for providing increased seed oil quantity and/or quality include polypeptides involved in fatty acid and glycerolipid biosynthesis, beta-oxidation enzymes, enzymes involved in biosynthesis of nutritional compounds, such as carotenoids and tocopherols, or polypeptides that increase embryo size or number or thickness of aleurone are useful to include on MCs.

[0189] Genes encoding polypeptides involved in production of galactomannans or arabinogalactans are of interest for providing plants that have increased and/or modified reserve polysaccharides for use in food, pharmaceutical, cosmetic, paper and paint industries can also be delivered on MCs.

[0190] Genes encoding polypeptides involved in modification of flavonoid/isoflavonoid metabolism in plants include cinnamate-4-hydroxylase, chalcone synthase or flavones synthase are also useful to include on MCs. Enhanced or reduced activity of such polypeptides in modified plants will provide changes in the quantity and/or speed of flavonoid metabolism in plants and can improve disease resistance by enhancing synthesis of protective secondary metabolites or improving signaling pathways governing disease resistance.

[0191] Genes encoding polypeptides involved in lignin biosynthesis are of interest for increasing plants' resistance to lodging and for increasing the usefulness of plant materials as biofuels can be delivered on MCs.

[0192] Production or Assimilation of Chemicals or Biological Compounds

[0193] Modified plants can be made that can be used for the production or manufacturing of useful biological compounds that were either not produced at all, or not produced at the same level, in the plant previously. Alternatively, plants produced according to the invention can be engineered to metabolize or absorb and concentrate certain compounds, such as hazardous wastes, thereby allowing bioremediation of these compounds.

[0194] The vast array of possibilities include any biological compound that is presently produced by any organism, such as proteins, nucleic acids, primary and intermediary metabolites, carbohydrate polymers, enzymes for uses in bioremediation, enzymes for modifying pathways that produce secondary plant metabolites such as falconoid or vitamins, enzymes that could produce pharmaceuticals, and for introducing enzymes that could produce compounds of interest to the manufacturing industry such as specialty chemicals and plastics. The compounds can be produced by the plant, extracted upon harvest and/or processing, and used for any presently recognized useful purpose such as pharmaceuticals, fragrances, and industrial enzymes.

[0195] Other Characteristics

[0196] Cell cycle modification: Polypeptides encoding cell cycle enzymes and regulators of the cell cycle pathway are useful for manipulating growth rate in plants to provide early vigor and accelerated maturation. Improvements in quality traits, such as seed oil content, can also be obtained by expression of cell cycle enzymes and cell cycle regulators. Polypeptides of interest for modification of cell cycle pathway include cyclin and EF5 alpha pathway proteins, polypeptides involved in polyamine metabolism, polypeptides that act as regulators of the cell cycle pathway, including cyclin-dependent kinases (CDKs), CDK-activating kinases, cell cycle-dependent phosphatases, CDIC-inhibitors, Rb and Rb-binding proteins, or transcription factors that activate genes involved in cell proliferation and division, such as the E2F family of transcription factors, proteins involved in degradation of cyclins and plant homologs of tumor suppressor polypeptides.

[0197] Plant growth regulators: Polypeptides involved in production of substances that regulate the growth of various plant tissues are of interest in the present invention and can be used to provide modified plants having altered morphologies and improved plant growth and development profiles leading to improvements in yield and stress response. Of particular interest are polypeptides involved in the biosynthesis, or degradation of plant growth hormones, such as gibberellins, brassinosteroids, cytokinins, auxins, ethylene or abscisic acid, and other proteins involved in the activity, uptake and/or transport of such polypeptides, including for example, cytokinin oxidase, cytokinin/purine permeases, F-box proteins, G-proteins or phytosulfokines.

[0198] Transcription factors in plants: Transcription factors play a key role in plant growth and development by controlling the expression of one or more genes in temporal, spatial and physiological specific patterns. Enhanced or reduced activity of such polypeptides in modified plants can provide significant changes in gene transcription patterns and provide a variety of beneficial effects in plant growth, development and response to environmental conditions. Transcription factors of interest include myb transcription factors, including hefix-turn-helix proteins, homeodomain transcription factors, leucine zipper transcription factors, MADS transcription factors, transcription factors having AP2 domains, zinc finger transcription factors, CCAAT binding transcription factors, ethylene responsive transcription factors, transcription initiation factors or UV damaged DNA binding proteins.

[0199] Homologous recombination: Increasing the rate of homologous recombination in plants is useful for accelerating the introgression of transgenes into breeding varieties by backcrossing, and to enhance the conventional breeding process by allowing rare recombinants between closely linked genes in phase repulsion to be identified more easily. Polypeptides useful for expression in plants to provide increased homologous recombination include polypeptides involved in mitosis and/or meiosis, DNA replication, nucleic acid metabolism, DNA repair pathways or homologous recombination pathways including for example, recombinases, nucleases, proteins binding to DNA double-strand breaks, single-strand DNA binding proteins, strand-exchange proteins, resolvases, ligases, helicases and polypeptide members of the RAD52 epistasis group.

[0200] Non-Protein-Expressing Exogenous Nucleic Acids

[0201] Plants with decreased expression of a gene of interest can also be achieved, for example, by expression of antisense nucleic acids, dsRNAmiRNAs, siRNAs, or RNAi, catalytic RNA such as ribozymes, sense expression constructs that exhibit cosuppression effects, or aptamers.

[0202] Antisense RNA reduces production of the polypeptide product of the target messenger RNA, for example by blocking translation through formation of RNA:RNA duplexes or by inducing degradation of the target mRNA. Antisense approaches are a way of preventing or reducing gene function by targeting the genetic material as disclosed in U.S. Pat. Nos. 4,801,540; 5,107,065; 5,759,829; 5,910,444; 6,184,439; and 6,198,026. In one approach, an antisense gene sequence is introduced that is transcribed into antisense RNA that is complementary to the target mRNA. For example, part or all of the normal gene sequences are placed under a promoter in inverted orientation so that the complementary strand is transcribed into a non-protein expressing antisense RNA. The promoter used for the antisense gene can influence the level, timing, tissue, specificity, or inducibility of the antisense inhibition.

[0203] Autonomous MCs can contain exogenous DNA bounded by recombination sites, for example lox-P sites, that can be recognized by a recombinase, e.g., Cre, and removed from the MC. In cases where there is a homologous recombination site or sites in the host genomic DNA, the exogenous DNA excised the MC can be integrated into the genome at one of the specific recombination sites and the DNA bounded by the recombination sites will become integrated into the host DNA. The use of a MC as a platform for DNA excision or for launching such DNA integration into the host genome can include in vivo induction of the expression of a recombinase encoded in the genomic DNA of a transgenic host, or in a MC or other episome.

[0204] RNAi gene suppression in plants by transcription of a dsRNA is described in U.S. Pat. No. 6,506,559, U.S. patent application Publication No. 2002/0168707, WO 98/53083, WO 99/53050 and WO 99/61631. The double-stranded RNA or RNAi constructs can trigger the sequence-specific degradation of the target messenger RNA. Suppression of a gene by RNAi can be achieved using a recombinant DNA construct having a promoter operably linked to a DNA element comprising a sense and anti-sense element of a segment of genomic DNA of the gene, e.g., a segment of at least about 23 nucleotides, more preferably about 50 to 200 nucleotides where the sense and anti-sense DNA components can be directly linked or joined by an intron or artificial DNA segment that can form a loop when the transcribed RNA hybridizes to form a hairpin structure.

[0205] miRNA (microRNAs) are short RNA sequences, approximately 22 nucleotides long, that are capable of binding to complementary sequences in the 3′ UTR of target mRNAs. Binding of the miRNA to the target mRNAs can result in their silencing. Genes encoding artificial miRNAS (amiRNAs) can be engineered to express amiRNAs that silence specific mRNAs (Schwab, Ossowski et al. 2006). Genes encoding miRNAs or amiRNAs can be included on MCs.

[0206] Small interfering RNA (siRNA) are short double-stranded RNA molecules (20-25 nucleotides long) that can mediate the RNAi pathway and silence the expression of specific genes. These RNAs are also thought to play a role in protection from viruses, and modulating chromatin structure. Like miRNA, it is also possible to engineer genes to encode artificial siRNA for the purpose of gene silencing (de la Luz Gutierrez-Nava, Aukerman et al. 2008). Genes encoding siRNAs can be included on MCs.

[0207] Catalytic RNA molecules or ribozymes can also be used to inhibit expression of the target gene or genes or facilitate molecular reactions. Ribozymes are targeted to a given sequence by hybridization of sequences within the ribozyme to the target mRNA. Two stretches of homology are required for this targeting, and these stretches of homologous sequences flank the catalytic ribozyme structure. It is possible to design ribozymes that specifically pair with virtually any target mRNA and cleave the target mRNA at a specific location, thereby inactivating it. A number of classes of ribozymes have been identified. One class of ribozymes is derived from a number of small circular RNAs that are capable of self-cleavage and replication in plants. The RNAs replicate either alone (viroid RNAs) or with a helper virus (satellite RNAs). Examples include Tobacco Ringspot Virus, Avocado Sunblotch Viroid, and Lucerne Transient Streak Virus, and the satellite RNAs from velvet tobacco mottle virus, Solanum nodiflorum mottle virus and subterranean clover mottle virus. The design and use of target RNA-specific ribozymes has been described (Haseloff and Gerlach 1988). Several different ribozyme motifs have been described with RNA cleavage activity (Symons 1992). Other suitable ribozymes include sequences from RNase P with RNA cleavage activity (U.S. Pat. Nos. 5,168,053 and 5,624,824), hairpin ribozyme structures (Chowrira, Pavco et al. 1994) and Hepatitis Delta virus based ribozymes (U.S. Pat. No. 5,625,047).

[0208] Another method of reducing protein expression utilizes the phenomenon of co-suppression or gene silencing (for example, U.S. Pat. No. 6,063,947; 5,686,649; or 5,283,184). Co-suppression of an endogenous gene can be accomplished using a full-length cDNA sequence as well as a partial cDNA sequence. The phenomenon of co-suppression has also been used to inhibit plant target genes in a tissue-specific manner.

[0209] In some embodiments, nucleic acids from one species of plant are expressed in another species of plant to effect co-suppression of a homologous gene. The introduced sequence generally will be substantially identical to the endogenous sequence intended to be repressed, for example, about 65%, 80%, 85%, 90%, or preferably 95% or greater identical. Higher identity can result in a more effective repression of expression of the endogenous sequence. A higher identity in a shorter than full length sequence compensates for a longer, less identical sequence. Furthermore, the introduced sequence need not have the same intron or exon pattern, and identity of non-coding segments will be equally effective. Generally, where inhibition of expression is desired, some transcription of the introduced sequence occurs. The effect can occur where the introduced sequence contains no coding sequence per se, but only intron or untranslated sequences homologous to sequences present in the primary transcript of the endogenous sequence.

[0210] Yet another method of reducing protein activity is by expressing nucleic acid ligands, aptamers, that specifically bind to the protein. Aptamers can be obtained by the SELEX (Systematic Evolution of Ligands by Exponential Enrichment) method (U.S. Pat. No. 5,270,163).

[0211] Other examples of non-protein expressing sequences specifically envisioned for use with the invention include tRNA sequences, for example, to alter codon usage, and rRNA variants, for example, that can confer resistance to various agents such as antibiotics.

[0212] Unexpressed DNA sequences, including novel synthetic sequences, can be introduced into cells as proprietary “labels” of those cells and plants and seeds thereof. It would not be necessary for a label DNA element to disrupt the function of a gene endogenous to the host organism, as the sole function of this DNA would be to identify the origin of the organism. For example, one could introduce a unique DNA sequence into a plant and this DNA element would identify all cells, plants, and progeny of these cells as having arisen from that labeled source. It is proposed that inclusion of label DNAs would enable one to distinguish proprietary germplasm or germplasm derived from such, from unlabelled germplasm.

### E. Exemplary Plant Promoters, Regulatory Sequences and Targeting Sequences

[0213] Exemplary classes of plant promoters are described below.

[0214] Constitutive Expression promoters: Exemplary constitutive expression promoters include the ubiquitin promoter, the CaMV 35S promoter (U.S. Pat. Nos. 5,858,742 and 5,322,938); and the actin promoter (e.g., rice—U.S. Pat. No. 5,641,876).

[0215] Inducible Expression promoters: Exemplary inducible expression promoters include the chemically regulatable tobacco PR-1 promoter (e.g., tobacco—U.S. Pat. No. 5,614,395; maize—U.S. Pat. No. 6,429,362). Various chemical regulators can be used to induce expression, including the benzothiadiazole, isonicotinic acid, and salicylic acid compounds disclosed in U.S. Pat. Nos. 5,523,311 and 5,614,395. Other promoters inducible by certain alcohols or ketones, such as ethanol, include the alcA gene promoter from Aspergillus nidulans (Caddick et al., 1998). Glucocorticoid-mediated induction systems can also be used (Aoyama and Chua 1997). Another class of useful promoters are water-deficit-inducible promoters, e.g., promoters that are derived from the 5′ regulatory region of genes identified as a heat shock protein 17.5 gene (HSP 17.5), an HVA22 gene (HVA22), and a cinnamic acid 4-hydroxylasc gene (CA4H) of Zea mays. Another water-deficit-inducible promoter is derived from the rab-17 promoter. U.S. Pat. No. 6,084,089 discloses cold inducible promoters, U.S. Pat. No. 6,294,714 discloses light inducible promoters, U.S. Pat. No. 6,140,078 discloses salt inducible promoters, U.S. Pat. No. 6,252,138 discloses pathogen inducible promoters, and U.S. Pat. No. 6,175,060 discloses phosphorus deficiency inducible promoters.

[0216] Wound-inducible promoters can also be used, e.g., (Mialhe and Miller, 1994; Warner et al., 1993; Xu et al., 1993).

[0217] Tissue-Specific Promoters: Exemplary promoters that express genes only in certain tissues are useful. For example, root-specific expression can be attained using the promoter of the maize metallothionein-like (MTL) gene (U.S. Pat. No. 5,466,785). U.S. Pat. No. 5,837,848 discloses a root-specific promoter. Another exemplary promoter confers pith-preferred expression (maize trpA gene and promoter; WO 93/07278). Leaf-specific expression can be attained, for example, by using the promoter for a maize gene encoding phosphoenol carboxylase. Pollen-specific expression can be conferred by the promoter for the maize calcium-dependent protein kinase (CDPK) gene that is expressed in pollen cells (WO 93/07278). U.S. Pat. Appl. Pub. No. 20040016025 describes tissue-specific promoters. Pollen-specific expression can also be conferred by the tomato LAT52 pollen-specific promoter. U.S. Pat. No. 6,437,217 discloses a root-specific maize RS81 promoter, U.S. Pat. No. 6,426,446 discloses a root specific maize RS324 promoter, U.S. Pat. No. 6,232,526 discloses a constitutive maize A3 promoter, U.S. Pat. No. 6,177,611 that discloses constitutive maize promoters, U.S. Pat. No. 6,433,252 discloses a maize L3 oleosin promoter that are aleurone and seed coat-specific promoters, U.S. Pat. No. 6,429,357 discloses a constitutive rice actin 2 promoter and intron, U.S. patent application Pub. No. 20040216189 discloses an inducible constitutive leaf-specific maize chloroplast aldolase promoter.

[0218] Optionally a plant transcriptional terminator can be used in place of the plant-expressed gene native transcriptional terminator. Exemplary transcriptional terminators are those that are known to function in plants and include the CaMV 35S terminator, the tml terminator, the nopaline synthase terminator and the pea rbcS E9 terminator. These can be used in both monocotyledons and dicotyledons.

[0219] Various intron sequences have been shown to enhance expression. For example, the introns of the maize Adh1 gene can significantly enhance expression, especially intron 1 (Callis, Fromm et al. 1987). The intron from the maize bronze) gene also enhances expression. Intron sequences have been routinely incorporated into plant transformation vectors, typically within the non-translated leader. U.S. Patent Application Publication 2002/0192813 discloses 5′, 3′ and intron elements useful in the design of effective plant expression vectors.

[0220] A number of non-translated leader sequences derived from viruses are also known to enhance expression, and these are particularly effective in dicotyledonous cells. Specifically, leader sequences from Tobacco Mosaic Virus (TMV, the “omega-sequence”), Maize Chlorotic Mottle Virus (MCMV), and Alfalfa Mosaic Virus (AMV) can enhance expression. Other leader sequences known and include: picornavirus leaders, for example, EMCV leader (Encephalomyocarditis 5′ noncoding region); potyvirus leaders, for example, TEV leader (Tobacco Etch Virus); MDMV leader (Maize Dwarf Mosaic Virus); human immunoglobulin heavy-chain binding protein (BiP) leader; untranslated leader from the coat protein mRNA of alfalfa mosaic virus (AMV RNA 4); tobacco mosaic virus leader (TMV); or Maize Chlorotic Mottle Virus leader (MCMV).

[0221] A minimal promoter can also be incorporated. Such a promoter has low background activity in plants when there is no transactivator present or when enhancer or response element binding sites are absent. An example is the BzI minimal promoter, obtained from the bronze) gene of maize. A minimal promoter can also be created by use of a synthetic TATA element. The TATA element allows recognition of the promoter by RNA polymerase factors and confers a basal level of gene expression in the absence of activation.

[0222] Sequences controlling the targeting of gene products also can be included. For example, the targeting of gene products to the chloroplast is controlled by a signal sequence found at the amino terminal end of various proteins that is cleaved during chloroplast import to yield the mature protein (e.g., (Comai et al., 1988)). These signal sequences can be fused to heterologous gene products to import heterologous products into the chloroplast. DNA encoding for appropriate signal sequences can be isolated from the 5′ end of the cDNAs encoding the RUBISCO protein, the CAB protein, the EPSP synthasc enzyme, the GS2 protein or many other proteins that are known to be chloroplast localized. Other gene products are localized to other organelles, such as the mitochondrion and the peroxisome (e.g., (Unger, Hand et al. 1989)). Examples of sequences that target to such organelles are the nuclear-encoded ATPases or specific aspartate amino transferase isoforms for mitochondria. Amino terminal and carboxy-terminal sequences are responsible for targeting to the ER, the apoplast, and extracellular secretion from aleurone cells. Amino terminal sequences in conjunction with carboxy terminal sequences can target to the vacuole.

[0223] Another element that can be introduced is a matrix attachment region element (MAR), such as the chicken lysozyme A element that can be positioned around an expressible gene of interest to effect an increase in overall expression of the gene and diminish position dependent effects upon incorporation into the plant genome.

[0224] Use of Non-Plant Promoter Regions Isolated from Drosophila melanogaster and Saccharomyces cerevisiae to Express Genes in Plants

[0225] The promoter in the MC of the present invention can be derived from plant or non-plant species. For example, the nucleotide sequence of the promoter is derived from non-plant species for the expression of genes in plant cells, such as dicotyledon plant cells, such as cotton. Non-plant promoters can be constitutive or inducible promoters derived from insects, e.g., Drosophila melanogaster, or from yeast, e.g., Saccharomyces cerevisiae. Table 2 lists some of the promoters from Drosophila melanogaster and Saccharomyces cerevisiae that can be used as non-plant promoters; this list is not exhaustive. Promoters derived from any animal, protist, or fungi can also be used. SEQ ID NOS:1-20 are examples of promoter sequences derived from Drosophila melanogaster or Saccharomyces cerevisiae. These non-plant promoters can be operably linked to nucleic acid sequences encoding polypeptides or non-protein-expressing sequences including antisense RNA, miRNA, siRNA, and ribozymes, to form nucleic acid constructs, vectors, and host cells (prokaryotic or eukaryotic), comprising the promoters.

TABLE 2
Examples of non-plant promoters from Drosophila melanogaster
and Sacchromyces cerevisiae

| Drosophila melanogaster | | | Sacchromyces cerevisiae | | |
|---|---|---|---|---|---|
| SEQ | | Promoter gene | SEQ | | |
| ID NO: | Symbol | name | ID NO: | Symbol | Promoter gene |
| 1 | gd | Phosphogluconate | 7 | ef-2 | TEF2 |
| | | dehydrogenase | 8 | eu-1 | LEU1 |
| 2 | rim | grim | 9 | Et16 | METhionine |
| 3 | ro | Urate oxidase | | | requiring |
| 4 | na | snail | 10 | eu-2 | LEU2 |
| 5 | h3 | Rhodopsin 3 | 11 | is-4 | HIS4 |
| 6 | sp-1γ | Larval serum | 12 | et-2 | MET2 |
| | | protein 1 γ | 13 | tc-3 | STE3 |
| | | | 14 | rg-1 | ARG1 |
| | | | 15 | gk-1 | PGK1 |
| | | | 16 | PD-1 | GPD1 |
| | | | 17 | DH1 | ADH1 |
| | | | 18 | PD-2 | GPD2 |
| | | | 19 | rg-4 | ARGinine |
| | | | | | requiring |
| | | | 20 | at-1 | YAT-1 |

[0226] The present invention relates to methods for producing a polypeptide, comprising cultivating plant material for the production of the polypeptide at any level, wherein the plant host cells comprises a first nucleic acid sequence encoding the polypeptide operably linked to a second nucleic acid sequence comprising a heterologous promoter foreign to the nucleic acid sequence, wherein the promoter comprises a sequence selected from the group consisting of SEQ ID NOS:1-20 or subsequences thereof; and mutant, hybrid, or tandem promoters thereof that retain promoter activity.

[0227] The present invention also relates to methods for producing non-protein expressed sequences, comprising cultivating plant material for the production of the non-protein expressed sequence, wherein the plant host cell comprises a first nucleic acid sequence encoding the non-protein expressed sequences operably linked to a second nucleic acid sequence comprising a heterologous promoter foreign to the nucleic acid sequence, wherein the promoter comprises a sequence selected from the group consisting of SEQ ID NOS: 1 to 20 or subsequences thereof; and mutant, hybrid, or tandem promoters thereof.

[0228] The present invention also relates to isolated promoter sequences and to constructs, vectors, or plant host cells comprising one or more of the promoters operably linked to a nucleic acid sequence encoding a polypeptide or non-protein expressing sequence.

[0229] In the methods of the present invention, the promoter can also be a mutant of the promoters having a substitution, deletion, and/or insertion of one or more nucleotides in the nucleic acid sequence of SEQ ID NOS:1-20.

[0230] The present invention also relates to methods for obtaining derivative promoters of SEQ ID NOS:1-20.

[0231] The techniques used to isolate or clone a nucleic acid sequence comprising a promoter of interest are known in the art and include isolation from genomic DNA. The cloning procedures can involve excision or amplification, for example by polymerase chain reaction (PCR), and isolation of a desired nucleic acid fragment comprising the nucleic acid sequence encoding the promoter, insertion of the fragment into a vector molecule, and incorporation of the recombinant vector into the plant cell.

### F. Constructing MCs by Site-Specific Recombination

[0232] Plant MCs can be constructed using site-specific recombination sequences (for example those recognized by the bacteriophage P1 Cre recombinase, or the bacteriophage lambda integrase, or similar recombination enzymes). A compatible recombination site, or a pair of such sites, is present on both the centromere containing DNA clones and the donor DNA clones. Incubation of the donor clone and the centromere clone in the presence of the recombinase enzyme causes strand exchange to occur between the recombination sites in the two plasmids; the resulting MCs contain centromere sequences as well as MC vector sequences. The DNA molecules formed in such recombination reactions is introduced into E. coli, other bacteria, yeast or plant cells by common methods in the field including, heat shock, chemical transformation, electroporation, particle bombardment, whiskers, or other transformation methods followed by selection for marker genes, including chemical, enzymatic, or color markers present on either parental plasmid, allowing for the selection of transformants harboring MCs.

### G. Methods of Detecting and Characterizing MCs in Plant Cells or of Scoring MC Performance in Plant Cells

[0233] Identification of Candidate Centromere Fragments by Probing BAC Libraries

[0234] The invention also provides for a novel method for identifying centromere sequences that are neither highly methylated nor comprising of tandem repeats. In this method, all available genomic nucleic acid sequences from an organism are assembled into low-stringency contigs. Those contigs having the largest assemblies (i.e., many sequences aligned, “deep read”) are then further examined. The pool of “largest” assemblies can be the top 1%, 2%, 3%, 4%, 5%, 6%, 7%, or 10% or more. This pool of contigs is then examined first for contigs containing tandem repeats using commonly available software. These contigs are eliminated from the pool. A consensus sequence determined for the remaining contigs with the deepest reads. Probes are designed and synthesized based on the consensus squence, and used in an assay that allows for the detection of centromere sequences, such as fluorescence in situ hybridization (FISH) of mitotic or meiotic metaphase chromosomes. Of course, any suitable assay can be used. When using FISH, for example, a good candidate for a centromere sequence is a probe that labels every primary constriction of every chromosome (though genomes of allopolyploids may contain distinct sub-genomes with distinct centromeres). If desired, the candidate sequence can be further tested with other morphological or functional assays.

[0235] Methods for determining consensus sequence are well known in the art, e.g., U.S. Pat. App. Pub. No. 20030124561; (Hall, Fiebig et al. 2002). These methods, including DNA sequencing, assembly, and analysis, are well known and there are many possible variations known to those skilled in the art. Other alignment parameters can also be useful such as using more or less stringent definitions of consensus.

[0236] Non-Selective MC Mitotic Inheritance Assays

[0237] The following assays can distinguish autonomous events from integrated events.

[0238] Assay #1: Transient Assay

[0239] MCs are tested for their ability to become established as chromosomes and their ability to be inherited in mitotic cell divisions. MCs are delivered to plant cells. The cells used can be at various stages of growth. In this example, a population in that some cells were undergoing division can be used. The MC is then assessed over the course of several cell divisions, by tracking the presence of a screenable marker, e.g., a visible marker gene such as one encoding a fluorescent protein. Following initial delivery into many single cells and several cell divisions, single transformed cells divide to form clusters of MC-containing cells if the MC is inherited well. Other exemplary embodiments of this method include delivering MCs to other mitotic cell types, including roots and shoot meristems.

[0240] Assay #2: Non-Lineage Based Inheritance Assays on Modified Transformed Cells and Plants

[0241] MC inheritance is assessed on modified cell lines and plants by following the presence of the MC over the course of multiple cell divisions. An initial population of MC containing cells is assayed for the presence of the MC, by the presence of a marker gene, such as a gene encoding a fluorescent protein, a colored protein, a protein assayable by histochemical assay, or a gene affecting cell morphology. All nuclei are stained with a DNA-specific dye including but not limited to DAPI, Hoechst 33258, OliGreen, Giemsa YOYO, or TOTO, allowing a determination of the number of cells that do not contain the MC. After the initial determination of the percent of cells carrying the MC, the cells are allowed to divide over the course of several cell divisions. The number of cell divisions, n, is determined by an appropriate method, such as monitoring the change in total weight of cells, monitoring the change in volume of the cells, or directly counting cells in an aliquot of the culture. After a number of cell divisions, the population of cells is again assayed for the presence of the MC. The loss rate per generation is calculated by the equation (I):

Loss rate per generation=1−(F/1)^{1/n} (I)

[0242] The population of MC-containing cells can include suspension cells, callus, roots, leaves, meristems, flowers, or any other tissue of modified plants, or any other cell type containing a MC.

[0243] Assay #3: Lineage-Based Inheritance Assays on Modified Cells and Plants

[0244] MC inheritance is assessed on modified cell lines and plants by following the presence of the MC over the course of multiple cell divisions. In cell types that allow for tracking of cell lineage, such as root cell files, trichomes, and leaf stomata guard cells, MC loss per generation does not need to be determined statistically over a population, it can be discerned directly through successive cell divisions. In other manifestations of this method, cell lineage can be discerned from cell position, or methods including but not limited to the use of histological lineage tracing dyes, and the induction of genetic mosaics in dividing cells.

[0245] In one example, the two guard cells of the stomata are daughters of a single precursor cell. To assay MC inheritance in this cell type, the epidermis of the leaf of a plant containing a MC is examined for the presence of the MC by the presence of a marker gene, including one encoding a fluorescent protein, a colored protein, a protein assayable by histochemical assay, or a gene affecting cell morphology. The number of loss events in which one guard cell contains the MC (L) and the number of cell divisions in which both guard cells contain the MC (B) are counted. The loss rate per cell division is determined as L/(L+B). Other lineage-based cell types are assayed in similar fashion. Similar assays have been used in yeast.

[0246] Lineal MC inheritance can also be assessed by examining root files or clustered cells in callus over time. Changes in the percent of cells carrying the MC indicate the mitotic inheritance.

[0247] Assay #4: Inheritance Assays on Modified Cells and Plants in the Presence of Chromosome Loss Agents

[0248] Assays #1-3 can be done in the presence of chromosome loss agents (e.g., colchicine, colcemid, caffeine, etopocide, nocodazole, oryzalin, and trifluran). It is likely that autonomous MCs are more susceptible to loss induced by chromosome loss agents; therefore, autonomous MCs show a lower rate of inheritance in the presence of chromosome loss agents. These methods have been used to study chromosome loss in fruit flies and yeast.

### H. Transformation of Plant Cells and Plant Regeneration

[0249] Various methods can be used to deliver DNA into plant cells. These include biological methods, such as Agrobacterium, E. coli, and viruses; physical methods, such as biolistic particle bombardment, nanocopiea device, the Stein beam gun, silicon carbide whiskers and microinjection; electrical methods, such as electroporation; and chemical methods, such as the use of polyethylene glycol and other compounds that stimulate DNA uptake into cells (Dunwell 1999) and U.S. Pat. No. 5,464,765.

[0250] Agrobacterium-Mediated Delivery

[0251] Several Agrobacterium species mediate the transfer of “T-DNA” that can be genetically engineered to carry a desired piece of DNA into many plant species. Plasmids used for delivery contain the T-DNA flanking the nucleic acid to be inserted into the plant. The major events marking the process of T-DNA mediated pathogenesis are induction of virulence genes, processing and transfer of T-DNA.

[0252] There are three common methods to transform plant cells with Agrobacterium. The first method is co-cultivation of Agrobacterium with cultured isolated protoplasts. This method requires an established culture system that allows culturing protoplasts and plant regeneration from cultured protoplasts. The second method is transformation of cells or tissues with Agrobacterium. This method requires (a) that the plant cells or tissues can be modified by Agrobacterium and (b) that the modified cells or tissues can be induced to regenerate into whole plants. The third method is transformation of seeds, apices or meristems with Agrobacterium. This method requires exposure of the meristematic cells of these tissues to Agrobacterium and micropropagation of the shoots or plant organs arising from these meristematic cells.

[0253] Those of skill in the art are familiar with procedures for growth and suitable culture conditions for Agrobacterium, as well as subsequent inoculation procedures. Liquid or semi-solid culture media can be used. The density of the Agrobacterium culture used for inoculation and the ratio of Agrobacterium cells to explant can vary from one system to the next, as can media, growth procedures, timing and lighting conditions.

[0254] Transformation of dicotyledons using Agrobacterium has long been known in the art, and transformation of monocotyledons using Agrobacterium has also been described (WO 94/00977; U.S. Pat. No. 5,591,616; US20040244075).

[0255] A number of wild-type and disarmed strains of Agrobacterium tumefaciens and Agrobacterium rhizogenes harboring Ti or Ri plasmids can be used for gene transfer into plants. Preferably, the Agrobacterium hosts contain disarmed Ti and Ri plasmids that do not contain the oncogenes that cause tumorigenesis or rhizogenesis. Exemplary strains include Agrobaclerium tumefaciens strain CSS, a nopaline-type strain that is used to mediate the transfer of DNA into a plant cell, octopine-type strains such as LBA4404 or succinamopine-type strains, e.g., EHA101 or EHA105.

[0256] The efficiency of transformation by Agrobacterium can be enhanced by using a number of methods known in the art. For example, the inclusion of a natural wound response molecule such as acetosyringone (AS) to the Agrobaclerium culture can enhance transformation efficiency with Agrobaclerium tumefaciens. Alternatively, transformation efficiency can be enhanced by wounding the target tissue to be modified or transformed. Wounding of plant tissue can be achieved, for example, by punching, maceration, bombardment with microprojectiles, etc.

[0257] In addition, transfer of a disarmed Ti plasmid without T-DNA and another vector with T-DNA containing the marker enzyme beta-glucuronidase can be accomplished into three different bacteria other than Agrobacteria (Broothaerts et al., 2005), which adds to the transformation vector arsenal.

[0258] Micro Projectile Bombardment Delivery

[0259] In this process, the desired nucleic acid is deposited on or in small dense particles, e.g., tungsten, platinum, or preferably 1 micron gold particles, that are then delivered at a high velocity into the plant tissue or plant cells using a specialized biolistics device, such as are available from Bio-Rad Laboratories (Hercules, Calif.). The advantage of this method is that no specialized sequences need to be present on the nucleic acid molecule to be delivered into plant cells.

[0260] For bombardment, cells in suspension are concentrated on filters or solid culture medium. Alternatively, immature embryos, seedling explants, or any plant tissue or target cells can be arranged on solid culture medium. The cells to be bombarded are positioned at an appropriate distance below the microprojectile stopping plate.

[0261] Various biolistics protocols have been described that differ in the type of particle or the manner in that DNA is coated onto the particle. Any technique for coating microprojectiles that allows for delivery of transforming DNA to the target cells can be used. For example, particles can be prepared by functionalizing the surface of a gold oxide particle by providing free amine groups. DNA, having a strong negative charge, binds to the functionalized particles.

[0262] Parameters such as the concentration of DNA used to coat microprojectiles can influence the recovery of transformants containing a single copy of the transgene. For example, a lower concentration of DNA may not necessarily change the efficiency of the transformation but can instead increase the proportion of single copy insertion events. Ranges of approximately 1 ng to approximately 10 pg, approximately 5 ng to 8 μg or approximately 20 ng, 50 ng, 100 ng, 200 ng, 500 ng, 1 pg, 2 μg, 5 μg, or 7 μg of transforming DNA can be used per each 1.0-2.0 mg of starting 1.0 micron gold particles.

[0263] Other physical and biological parameters can be varied, such as manipulation of the DNA/microprojectile precipitate, factors that affect the flight and velocity of the projectiles, manipulation of the cells before and immediately after bombardment (including osmotic state, tissue hydration and the subculture stage or cell cycle of the recipient cells), the orientation of an immature embryo or other target tissue relative to the particle trajectory, and also the nature of the transforming DNA, such as linearized DNA or intact supercoiled plasmids. Physical parameters such as DNA concentration, gap distance, flight distance, tissue distance, and helium pressure, can be optimized.

[0264] The particles delivered via biolistics can be “dry” or “wet.” In the “dry” method, the MC DNA-coated particles such as gold are applied onto a macrocarrier (such as a metal plate, or a carrier sheet made of a fragile material, such as mylar) and dried. The gas discharge then accelerates the macrocarrier into a stopping screen that halts the macrocarrier but allows the particles to pass through. The particles are accelerated at, and enter, the plant tissue arrayed below on growth media. The media surrports plant tissue growth and development and are suitable for plant transformation and regeneration. These tissue culture media can either be purchased as a commercial preparation, or custom prepared and modified. Examples of such media include Murashige and Skoog (MS), N6, Linsmaier and Skoog, Uchimiya and Murashige, Gamborg's B5 media, D medium, MCCown's Woody plant media, Nitsch and Nitsch, and Schenk and Hildebrandt. Those of skill in the art are aware that media and media supplements such as nutrients and growth regulators for use in transformation and regeneration and other culture conditions such as light intensity during incubation, pH, and incubation temperatures can be optimized.

[0265] Those of skill in the art can use, devise, and modify selective regimes, media, and growth conditions depending on the plant system and the selective agent. Typical selective agents include antibiotics, such as geneticin (G418), kanamycin, paromomycin; or other chemicals, such as glyphosate or other herbicides.

[0266] MC Delivery without Selection

[0267] The MC is delivered to plant cells or tissues, e.g., plant cells in suspension to obtain stably modified callus clones for inheritance assays. Suspension cells are maintained in a growth media, for example Murashige and Skoog (MS) liquid medium containing an auxin such as 2,4-dichlorophenoxyacetic acid (2,4-D). Cells are bombarded using a particle bombardment process and propagated in the same liquid medium to permit the growth of modified and unmodified cells. Portions of each bombardment are monitored for formation of fluorescent clusters, which are then isolated by micromanipulation and cultured on solid medium. Clones modified with the MC are expanded, and homogenous clones are used in inheritance assays, or assays measuring MC structure or autonomy.

[0268] MC Transformation with Selectable Marker Gene

[0269] MC-modified cells in bombarded calluses or explants can be isolated using a selectable marker gene. The bombarded tissues are transferred to a medium containing an appropriate selective agent. Tissues are transferred into selection between 0 and about 7 days or more after bombardment. Selection of MC-modified cells can be further monitored by tracking fluorescent marker genes or by the appearance of modified explants (modified cells on explants can be green under light in selection medium, while surrounding non-modified cells are weakly pigmented). In plants that develop through shoot organogenesis (e.g., Brassica, tomato or tobacco), the modified cells can form shoots directly, or alternatively, can be isolated and expanded for regeneration of multiple shoots transgenic for the MC. In plants that develop through embryogenesis (e.g., corn or soybean), additional culturing steps may be necessary to induce the modified cells to form an embryo and to regenerate in the appropriate media.

[0270] For selection to be effective, the plant cells or tissue need to be grown on selective medium containing the appropriate concentration of antibiotic or killing agent, and the cells need to be plated at a defined and constant density. The concentration of selective agent and cell density are generally chosen to cause complete growth inhibition of wild type plant tissue that does not express the selectable marker gene; but allowing cells containing the introduced DNA to grow and expand into adchromosomal clones. This critical concentration of selective agent typically is the lowest concentration at that there is complete growth inhibition of wild type cells, at the cell density used in the experiments. However, in some cases, sub-killing concentrations of the selective agent can be equally or more effective for the isolation of plant cells containing MC DNA, especially in cases where the identification of such cells is assisted by a visible marker gene (e.g., fluorescent protein gene) present on the MC.

[0271] In some species (e.g., tobacco or tomato), a homogenous clone of modified cells can also arise spontaneously when bombarded cells are placed under the appropriate selection. An exemplary selective agent is the neomycin phosphotransferase II (NptII) marker gene that confers resistance to the antibiotics kanamycin, G418 (geneticin) and paramomycin. In other species, or in certain plant tissues or when using particular selectable markers, homogeneous clones may not arise spontaneously under selection; in this case the clusters of modified cells can be manipulated to homogeneity using the visible marker genes present on the MCs as an indication of that cells contain MC DNA.

[0272] Regeneration of Adchromosomal Plants from Explants to Mature, Rooted Plants

[0273] For plants that develop through shoot organogenesis (e.g., Brassica, tomato and tobacco), regeneration of a whole plant involves culturing of regenerable explant tissues taken from sterile organogenic callus tissue, seedlings or mature plants on a shoot regeneration medium for shoot organogenesis, and rooting of the regenerated shoots in a rooting medium to obtain intact whole plants with a fully developed root system.

[0274] For plant species, such cotton, corn and soybean, regeneration of a whole plant occurs via an embryogenic step that is not necessary for plant species where shoot organogenesis is efficient. In these plants, the explant tissue is cultured on an appropriate media for embryogenesis, and the embryo is cultured until shoots form. The regenerated shoots are cultured in a rooting medium to obtain intact whole plants with a fully developed root system.

[0275] Explants are obtained from any tissues of a plant suitable for regeneration. Exemplary tissues include hypocotyls, internodes, roots, cotyledons, petioles, cotyledonary petioles, leaves and peduncles, prepared from sterile seedlings or mature plants.

[0276] Explants are wounded (for example with a scalpel or razor blade) and cultured on a shoot regeneration medium (SRM) containing Murashige and Skoog (MS) medium as well as a cytokinin, e.g., 6-benzylaminopurinc (BA), and an auxin, e.g., a-naphthaleneacetic acid (NAA), and an anti-ethylene agent, e.g., silver nitrate (AgNO₃). For example, 2 mg/L of BA, 0.05 mg/L of NAA, and 2 mg/L of AgNO₃ can be added to MS medium for shoot organogenesis. The most efficient shoot regeneration is obtained from longitudinal sections of internode explants.

[0277] Shoots regenerated via organogenesis are rooted in a MS medium containing low concentrations of an auxin such as NAA.

[0278] To regenerate a whole plant with a MC, explants are pre-incubated for 1 to 7 days (or longer) on the shoot regeneration medium prior to bombardment with MC (see below). Following bombardment, explants are incubated on the same shoot regeneration medium for a recovery period up to 7 days (or longer), followed by selection for transformed shoots or clusters on the same medium but with a selective agent appropriate for a particular selectable marker gene (see below).

[0279] Method of Co-Delivering Growth Inducing Genes to Facilitate Isolation of Ad Chromosomal Plant Cell Clones

[0280] Another method used in the generation of cell clones containing MCs involves the co-delivery of DNA containing genes that are capable of activating growth of plant cells, or that promote the formation of a specific organ, embryo or plant structure that is capable of self-sustaining growth. In one embodiment, the recipient cell receives simultaneously the MC, and a separate DNA molecule encoding one or more growth promoting, organogenesis-promoting, embryo genesis-promoting or regeneration-promoting genes. Following DNA delivery, expression of the plant growth regulator genes stimulates the plant cells to divide, or to initiate differentiation into a specific organ, embryo, or other cell types or tissues capable of regeneration. Multiple plant growth regulator genes can be combined on the same molecule, or co-bombarded on separate molecules. Use of these genes can also be combined with application of plant growth regulator molecules into the medium used to culture the plant cells, or of precursors to such molecules that are converted to functional plant growth regulators by the plant cell's biosynthetic machinery, or by the genes delivered into the plant cell.

[0281] The co-bombardment strategy of MCs with separate DNA molecules encoding plant growth regulators transiently supplies the plant growth regulator genes for several generations of plant cells following DNA delivery. During this time, the MC can be stabilized by virtue of its centromere, but the DNA molecules encoding plant growth regulator genes, or organogenesis-promoting, embryogenesis-promoting or re generation-promoting genes tend to be lost. The transient expression of these genes, prior to their loss, can give the cells containing MC DNA a sufficient growth advantage, or sufficient tendency to develop into plant organs, embryos or a regenerable cell cluster, to outgrow the non-modified cells in their vicinity, or to form a readily identifiable structure that is not formed by non-modified cells. Loss of the DNA molecule encoding these genes prevents phenotypes from manifesting themselves that can be caused by these genes if present through the remainder of plant regeneration. In rare cases, the DNA molecules encoding plant growth regulator genes integrate into the host plant's genome or into the MC.

[0282] Alternatively, the genes promoting plant cell growth can be genes promoting shoot formation or embryogenesis, or giving rise to any identifiable organ, tissue or structure that can be regenerated into a plant. In this case, embryos or shoots harboring MCs directly after DNA delivery are obtained without the need to induce shoot formation with growth activators, or lowering the growth activator treatment necessary to regenerate plants. The advantages of this method are more rapid regeneration, higher transformation efficiency, lower background growth of non-modified tissue, and lower rates of morphologic abnormalities in the regenerated plants.

[0283] Determination of MC Structure and Autonomy in Adchromosomal Plants and Tissues

[0284] The structure and autonomy of the MC in adchromosomal plants and tissues can be determined by: conventional and pulsed-field Southern blot hybridization to genomic DNA from modified tissue subjected or not subjected to restriction endonuclease digestion, dot blot hybridization of genomic DNA from modified tissue hybridized with different MC specific sequences, MC rescue, exonuclease activity, PCR on DNA from modified tissues with probes specific to the MC, or FISH to nuclei of modified cells. Table 3 below summarizes these methods.

TABLE 3
Autonomous MC assays

| Assay | Details | Potential outcome | Interpretation |
|---|---|---|---|
| Southern blot | Restriction digest of | 1. Native sizes and pattern of | 1. Autonomous or integrated |
| | genomic DNA | bands | via CEN fragment |
| | compared to | 2. Altered sizes or pattern of | 2. Integrated or rearranged |
| | purified MC | bands | |
| CHEF gel | Restriction digest of | 1. Native sizes and pattern of | 1. Autonomous or integrated |
| Southern blot | genomic DNA | bands | via CEN fragment |
| | | 2. Altered sizes or pattern of | 2. Integrated or rearranged |
| | | bands | |
| | Native genomic DNA | 1. MC band migrating ahead | 1. Autonomous circles or |
| | (no digest) | of genomic DNA | linears present |
| | | 2. MC band co-migrating with | 2. Integrated |
| | | genomic DNA | |
| | | 3. >1 MC bands observed | 3. Various possibilities |
| Exonuclease | Exonuclease | 1. Signal strength close to | 1. Autonomous circles present |
| | digestion of | that w/o exonuclease | |
| | genomic DNA with | 2. No sgnal or signal strength | 2. Integrated |
| | detection of circular | lower than w/o exonucldease | |
| | MC by PCR, dot blot, | | |
| | or restriction digest | | |
| | (optional), | | |
| | electrophoresis and | | |
| | southern blot | | |
| | (useful for circular | | |
| | MCs) | | |
| MC rescue | Transformation of | 1. Colonies isolated only from | 1. Autonomous circles |
| | plant genomic DNA | MC plants wit MC, not from | present, native MC structure |
| | into E. coli followed | controls; MC structure | |
| | by selection for | matches that of the paretal MC | |
| | antibiotic resistance | 2. Colonies isolated only fo | 2. Atuonomouse circles |
| | genes on MC | MC plants with MCs, not | present, rearranged MC |
| | | from controls; MC | structure OR MCs integrated |
| | | strctureerent from parental MC | via centromere fragment. |
| | | 3. Colonies in MC modified | 3. Various possibilities |
| | | plants and and in controls | |
| PCR | PCR amplification of | 1. All MC parts detected | 1. Complete MC sequences |
| | various parts of MC | | present |
| | | 2. Subset of MC parts | 2. Partial MC sequences |
| | | detected | present |
| FISH | Detection of MC | 1. MC seqeuences detected, | 1. Autonomous |
| | sequences in mitotic | free of genome | |
| | or meiotic nuclei by | 2. MC sequences detected, | 2. Integrated |
| | fluorescence in situ | associated with genome | |
| | hybridization | 3. MC sequences detected, | 3. Both autonomous and |
| | | free and associated with | integrated MC sequences |
| | | genome | present |
| | | 4. No MC sequences | 4. MC DNA not visible by |
| | | detected | FISH |

[0285] Furthermore, MC structure can be examined by characterizing MCs rescued from adchromosomal cells. Circular MCs that contain bacterial sequences for their selection and propagation in bacteria can be rescued from an adchromosomal plant or plant cell and re-introduced into bacteria. If no loss of sequences has occurred during replication of the MC in plant cells, the MC is able to replicate in bacteria and confer antibiotic resistance. Total genomic DNA is isolated from the adchromosomal plant cells. The purified genomic DNA is introduced into bacteria (e.g., E. coli), and the transformed bacteria are plated on solid medium containing antibiotics to select bacterial clones modified with MC DNA. Modified bacterial clones are grown, the plasmid DNA purified (by alkaline lysis for example), and DNA analyzed, such as by restriction enzyme digestion and gel elcctrophoresis or by sequencing. Because plant-methylated DNA containing methylcytosine residues is degraded by wild-type strains of E. coli, bacterial strains (e.g., DH10B) deficient in the genes encoding methylation restriction nucleases (e.g., the mcr and mrr gene loci in E. coli) are best suited for this type of analysis. MC rescue can be performed on any plant tissue or clone of plant cells modified with a MC.

### I. Analyses of Transformed Plants

[0286] MC Autonomy Demonstration by In Situ Hybridization

[0287] To assess whether the MC is autonomous from the native plant chromosomes, or has integrated into the plant genome, in situ hybridizations can be used, such as FISH. In this assay, mitotic or meiotic tissue, such as root tips or meiocytes from the anther, possibly treated with metaphase arrest agents such as colchicines is obtained, and standard FISH methods are used to label both the centromere and sequences specific to the MC. For example, a Gossypium centromere is labeled using a probe from a sequence that labels all Gossypium centromeres, attached to one fluorescent tag, such as one that emits the red visible spectrum (ALEXA FLUOR® 568, for example (Invitrogen; Carlsbad, Calif.)), and sequences specific to the MC are labeled with another fluorescent tag, such as one emitting in the green visible spectrum (ALEXA FLUOR® 488, for example). All centromere sequences are detected with the first tag; only MCs are detected with both the first and second tag. Chromosomes are stained with a DNA-specific dye including but not limited to DAP1, Hocchst 33258, OliGreen, Giemsa YOYO, and TOTO. An autonomous MC is visualized as a body that shows hybridization signal with both centromere probes and MC specific probes and is separate from the native chromosomes.

[0288] Determination of Gene Expression Levels

[0289] The expression level of any gene present on the MC can be determined by several methods, such as for RNA, Northern Blot hybridization, Reverse Transcriptase-PCR, binding levels of a specific RNA-binding protein, in situ hybridization, or dot blot hybridization; or for proteins, Western blot hybridization, Enzyme-Linked Immunosorbant Assay (ELISA), fluorescent quantitation of a fluorescent gene product, enzymatic quantitation of an enzymatic gene product, immunohistochemical quantitation, or spectroscopic quantitation of a gene product that absorbs a specific wavelength of light.

[0290] Use of Exonuclease to Isolate Circular MC DNA from Genomic DNA

[0291] Exonucleases can be used to obtain pure MC DNA, suitable for isolation of MCs from E. coli or from plant cells. The method assumes a circular structure of the MC. A DNA preparation containing MC DNA and genomic DNA from the source organism is treated with exonuclease, for example lambda exonuclease combined with E. coli exonuclease I, or the ATP-dependent exonuclease (Qiagen, Inc.; Germantown, Md.). Because the exonuclease is only active on DNA ends, it specifically degrades the linear genomic DNA fragments, but does not degrade circular MC DNA. The result is MC DNA in pure form. The resultant MC DNA can be detected by a number of methods for DNA detection, such as PCR, dot blot, and Southern blot. Exonuclease treatment followed by detection of resultant circular MC can be used to determine MC autonomy.

[0292] Structural Analysis of MCs by BAC-End Sequencing

[0293] BAC-end sequencing procedures can be used to characterize MC clones for a variety of purposes, such as structural characterization, determination of sequence content, and determination of the precise sequence at a unique site on the chromosome (for example the specific sequence signature found at the junction between a centromere fragment and the vector sequences). In particular, this method is useful to prove the relationship between a parental MC and the MCs descended from it and isolated from plant cells by MC rescue, described above.

[0294] Methods for Scoring Meiotic MC Inheritance

[0295] A variety of methods can be used to assess the efficiency of meiotic MC transmission. In one embodiment of the method, gene expression of genes on the MC (marker genes or non-marker genes) can be scored by any method for detection of gene expression known to those skilled in the art, including visible scoring methods (e.g., fluorescence of fluorescent protein markers, scoring of visible phenotypes of the plant), scoring resistance of the plant or plant tissues to antibiotics, herbicides or other selective agents, measuring enzyme activity of proteins encoded by genes on the MC, measuring non-visible plant phenotypes, or directly measuring the RNA and protein products of gene expression using, for example, microarrays, northern blots, in situ hybridizations, dot blots, RT-PCR, western blots, immunoprecipitations, ELISAs, immunofluorescence and radio-immunoassays (RIAs). Gene expression can be scored in the post-meiotic stages of microspore, pollen, pollen tube or female gametophyte, or the post-zygotic stages such as embryo, seed, or progeny seedlings and plants. In another embodiment, the MC can de directly detected or visualized in post-meiotic, zygotic, embryonal or other cells in by detecting DNA (e.g., by FISH) or by MC rescue described above.

[0296] FISH Analysis of MC Copy Number in Meiocytes, Roots or Other Tissues of Adchromosomal Plants

[0297] The copy number of the MC can be assessed in any cell or plant tissue by in situ hybridization, such as FISH. For example, FISH methods are used to label the centromere, using a probe that labels all chromosomes with one fluorescent tag, and to label sequences specific to the MC with another fluorescent tag. All centromere sequences are detected with the first tag; only MCs are detected with both the first and second tag. Nuclei are counter-stained with a DNA-specific dye, such as DAPI, Hoechst 33258, OliGreen, Giemsa YOYO, and TOTO. MC copy number is determined by counting the number of fluorescent foci that label with both tags.

[0298] Induction of Callus and Roots from Ad Chromosomal Plants Tissues for Inheritance Assays

[0299] MC inheritance is assessed using callus and roots induced from transformed plants. To induce roots and callus, tissues such as leaf pieces are prepared from adchromosomal plants and cultured on a MS medium containing a cytokinin, e.g., 6-benzylaminopurinc (BA), and an auxin, e.g., α-naphthaleneacctic acid (NAA). Any tissue of an adchromosomal plant can be used for callus and root induction, and the medium recipe for tissue culture can be optimized using procedures known in the art.

[0300] Clonal Propagation of Adchromosomal Plants

[0301] To produce multiple clones of plants from a MC-transformed plant, any tissue of the plant can be tissue-cultured for shoot organogenesis using regeneration procedures already described. Alternatively, multiple auxiliary buds can be induced from a MC-modified plant by excising the shoot tip, rooting the tip, and subsequently growing the tip into plant; each auxiliary bud can be rooted and produce a whole plant.

[0302] Scoring of Antibiotic- or Herbicide-Resistance in Seedlings and Plants (Progeny of Self- and Out-Crossed Transformants

[0303] Progeny seeds harvested from MC-modified plants can be scored for antibiotic- or herbicide resistance by seed germination under sterile conditions on a growth media (for example, MS medium) containing an appropriate selective agent for a particular selectable marker gene. Only seeds containing the MC can germinate on the medium and further grow and develop into whole plants. Alternatively, seeds can be germinated in soil, and the germinating seedlings can then be sprayed with a selective agent appropriate for a selectable marker gene. Seedlings that do not contain MC do not survive; only seedlings containing MC can survive and develop into mature plants.

[0304] Genetic Methods for Analyzing MC Performance

[0305] In addition to direct transformation of a plant with a MC, plants containing a MC can be prepared by crossing a first plant containing the functional, stable, autonomous MC with a second plant lacking the MC.

[0306] For example, pollen from an adchromosomal plant can be used to fertilize the stigma of a non-adchromosomal plant. MC presence is scored in the progeny of this cross using the methods outlined above. In the second embodiment, the reciprocal cross is performed by using pollen from a non-adchromosomal plant to fertilize the flowers of an adchromosomal plant. The rate of MC inheritance in both crosses can be used to establish the frequencies of meiotic inheritance in male and female meiosis. In the third embodiment, the progeny of one of the crosses just described are back-crossed to the non-adchromosomal parental line, and the progeny of this second cross are scored for the presence of genetic markers in the plant's natural chromosomes as well as the MC. Scoring of a sufficient marker set against a sufficiently large set of progeny allows the determination oflinkage or co-segregation of the MC (or lack thereof) to specific chromosomes or chromosomal loci in the plant's genome. Genetic crosses performed for testing genetic linkage can be done with a variety of combinations of parental lines as are known to those skilled in the art.

### IV. EXAMPLES

[0307] The following examples are for illustrative purposes only and should not be interpreted as limitations of the claimed invention. There are a variety of alternative techniques and procedures available to those of skill in the art which would similarly permit one to successfully perform the intended invention.

[0308] In summary, Examples 1-7 illustrate the identification of cotton centromere-localized sequences. In a first approach (illustrated in Example 1) cotton repetitive sequences were identified using methods that enrich for the highly repetitive and extensively methylated centromere DNA. First, the investigators digested G. hirsutum ™-1 genomic DNA with a methylation-sensitive restriction enzyme, then isolated fragments larger than 8 kb, to enrich for sequences that were extensively methylated and thus would not be cut by the methylation-sensitive endonucleases (Luo, Hall et al. 2004). The investigators then used these large fragments as probes to isolate clones from a G. hirsutum Bacterial Artificial Chromosome (BAC) library. To determine whether any of these clones derived from the centromere, the investigators used Fluorescence In Situ Hybridization (FISH) on mitotic spreads from cotton roots to look for localization to the cytological centromere, as defined by the primary constriction on each chromosome. The investigators tested 16 BACs representing highly methylated genomic DNA and found none that hybridized to the region of the cytological centromere.

[0309] In a second approach (Example 2), the investigators used tandem repeats as FISH probes to query the G. hirsutum genome because tandem repeats have been associated with the centromere in many plants. The tandem repeats were selected from those previously described in the literature, or by bioinformatic analysis of cotton genomic sequences to find simple tandem repeats. None of the repeats examined displayed obvious localization to the cytological centromere. These results compelled the investigators to use a different strategy to find centromere-associated sequences in the highly repetitive and methylated cotton genome.

[0310] Thus, as a third and different approach, the investigators reasoned that if, like other plants, the cotton centromere comprises mainly repetitive DNA, then it should be over-represented in randomly generated cotton genomic survey sequence. To test this theory (Example 3), the investigators downloaded G. hirsutum genomic sequences from the public databases and assembled them into contigs using low stringency parameters. The contigs containing the most overlapping sequences (the “deepest reads”) were selected for further analysis. The deep read sequences were grouped into classes by homology and a representative sample from each class was used as a FISH probe to determine possible localization at the cytological centromere. This approach identified one contig containing an LTR retrotransposon that specifically hybridizes to the primary constriction of all 52 chromosomes in G. hirsutum ™-1. Following the nomenclature of other centromere-associated elements, the investigators have designated this element Centromere Retroelement Gossypium, (CRG).

### Example 1

### Bioinformatics Identification of Tandem Repeats in G. hirsutum

[0311] In a first approach, the investigators compiled Gossypium repetitive genomic DNA as candidate probes for hybridization with the BAC libraries (Table 4). Gossypium sequence was extracted from GenBank and tandem repeats identified using publicly available repetitive DNA sequence finder software. The identified Gossypium repeat elements were PCR-amplified and used as fluorescence in situ hybridization (FISH) probes to identify repeat elements that localized to Gossypium chromosomes.

[0312] The investigators initially identified the sequence elements listed in Table 4 (SEQ ID NOs:21-27). Each sequence represents a different repetitive DNA sequence from G. hirsutum.

TABLE 4
Cotton repetitive genomic sequence and BAC library probes

| | | Repeat | |
|---|---|---|---|
| Probe | GenBank | length (bp) | PCR Primer Sequences (5′ to 3′) |
| ChrGh-1 | BH023123, | 195 | CRJM105: agggtcataa gacaagcttc |
| (SEQ ID NO: 21) | BH023124, | | agtcttggg (SEQ ID NO: 28) |
| | BH023255, | | CRJM106: caataataag ttggctaaag |
| | BH023337, | | attttcatag gc (SEQ ID NO: 29) |
| | BH023338, | | |
| | BH021849 | | |
| ChrGh-2 | BH022338 | 96 | CRJM107: atatataca ctttcacat tcatcacat |
| (SEQID NO: 22) | | | cgg (SEQ ID NO: 30) |
| | | | CRJM108: gtgataggg ccgaatgg ccgatgtga |
| | | | tg (SEQ ID NO: 31) |
| ChrGh-3 | BH022651 | 133 | CRJM109: attttggtat ttagatgtt cttttggt |
| (SEQ ID NO: 23) | | | c (SEQ ID NO: 32) |
| | | | CRJM110: ataacaatt ttattatat aaaaccgtg |
| | | | agc (SEQ ID NO: 33) |
| ChrGh-4 | BH022299 | 148 | CRJM111: tggaagtttaaagtagcttatgccaaac |
| (SEQ ID NO: 24) | | | (SEQ ID NO: 24) |
| | | | CRJM112: caagctttat gcaataaatt |
| | | | gtaaaaagg ag (SEQIDNO: 25) |
| ChrGh-5 | CL863894 | 225 | CRJM113: tcttatctcc ctgaagttg cagtggag |
| (SEQ ID NO: 25) | | | (SEQ ID NO: 36) |
| | | | CRJM114: ctttaacttc aacctgctc cactgctac |
| | | | (SEQ ID NO: 37) |
| ChrGh-6 | CLS640S9 | 108 | CRJM115: catgtaagac catgccaagg catggc |
| (SEQ ID NO: 26) | | | (SEQ ID NO: 28) |
| | | | CRJM116: gaaccttttc cttatagtaa |
| | | | ctcatcaat gcc (SEQIDNO: 29) |
| ChrGh-7 | BH0216-8 | 97 | CRJM117: cttacatct cttaagcta aatagtatg |
| (SEQ ID NO: 27) | | | tgatgaa (SEQ ID NO: 40) |
| | | | CRJM118: cagaacata ccaagcaac ccataaaac |
| | | | (SEQ ID NO: 41) |

[0313] In a variation of the tandem repeat approach that allowed the investigators to more quickly identify candidate centromeric tandem repeats, the rationale was used that tandem repeats that are specific to the centromere will be over-represented in sequenced genomes. G. hirsutum, an AD tetraploid, is the result of interspecific hybridization of “A”—African/Asian and “D”—American genomes. The genome comprises 52 chromosomes, and the haploid genome size is about 2.5 Gb. The investigators estimated that centromeric tandem repeats would constitute about 5% of the genome.

[0314] All cotton sequences available in the public databases were downloaded and assembled into contiguous arrays (“contigs”) using low stringency assembly algorithms. Those contigs having the most alignments (“deepest reads”), and presumably harboring centromeric repeats, are then selected for further analysis.

[0315] The investigators downloaded all nuclear genome cotton sequence data available from the public dataset “NCBI dbGSS” as of March 2009 (National Center for Biotechnology Information; National Library of Medicine; Bethesda, Md.) and used Tandem Repeat Finder software (Benson 1999), PHRAP (version 0.990329) (Bonfield and Staden 1995) and the NCBI Align Tool (Altschul, Gish et al. 1990).

[0316] The parameters for running PHRAP were:

[0317] Custom:
[0318] a. Maxgap 30
[0319] b. Revise_greedy
[0320] c. Shatter_greedy
[0321] d. Penalty −8

[0322] Manual ((−) more stringent)
[0323] e. Penalty −9 or −6
[0324] f. Penalty −2
[0325] g. Maxgap 30
[0326] h. Bypasslevel 1
[0327] i. Node_seg 8->optionals
[0328] j. Node_space 4->optionals
   [0329] i. Repeat_stringency 0.95->stringency
[0330] k. Forcelevel 0->non-stringency
[0331] I. Minmatch 14->stringency
[0332] m. Minscore 30 or 40->stringency
[0333] n. Bypasslevel 0

[0334] The contigs were visually inspected for any collapsed contigs. For all collapsed contigs, the PHRAP parameters were adjusted, and the assembly rerun. Non-collapsed contigs were then aligned manually or by using Align. The Tandem Repeat Finder was run on the deepest-read contigs using default parameters. After identifying those contigs with tandem repeats, the contigs were inspected to identify consensus sequences that were repeated more than two times and their coverage exceeded 100 bp. Those contigs that had deep reads and low complexity were analyzed for repetitive structure.

[0335] The identified contigs were then analyzed for alignment using BLASTN algorithms in GenBank to identify homology with other plants, discarding repeats that were identified in mRNAs.

[0336] Using this procedure, one previously identified (194 bp) and two novel tandem repeats (210 bp and 100 bp) were found; their consensus sequences are presented in Table 5.

TABLE 5
Tandem repeats identified in G. hirsutum

SEQ ID NO: 90 (CrGh1)
tttacacccc tagaagactg cctaagaaaa ttattagcaa cttattattg aaggtcataa 60
gacaagtttg agtcttgggg cattgaaacc atgttatatg cacatgtatc atcaccatca 120
aagaagctta attcatttta caaacagtga ctccactata gcgagcccaa ctagctcaca 180
tgtaacttga cttg 194
SEQ ID NO: 91
ccttccatca aagtggaaat gccagacttc gatttgttct ctgacaatac agagacgaca 60
aatcatctta gatttgcttc atcgtaaaca catgaaagcc aaatcagcta tatcttcgat 120
ctgctcccta ccgaatacag agagataaga tctgtcatct tggatctgct tcagcataaa 180
catctgaagg taagatctgc tatgtgtctg 210
SEQ ID NO: 92
ggcgatgcag tggaacagat taaagccaca tcggtgaatc ttgcttcccc gacattgcag 60
ttaaaaagat taaagctaca acagcgaatc ttactcccca 100

[0337] SEQ ID NOs:90-92 were then subjected to further analysis to determine if these sequences represented centromeric sequences.

[0338] Library Interrogation and Data Analysis

[0339] The BAC clones from the libraries (see Example 3 for library details) were spotted onto filters, and the filters were hybridized with a subset of the probes in Tables 4 and 5 to identify specific BAC clones that contained DNA from the group of sequences represented by the probes. The specific probes used were: CrGh1 (SEQ ID NO:90), and pXP1-80 (a Gossypium barbadense repeat sequence, Genbank accession number AF060649.1,

(SEQ ID NO: 99)
cccttggccg tgcgggagcc tctagcacca tcggcacctt ggtgcttgga tgtccgagaa 60
cctcgcgcac catcgacaac ctagg, 85

which had been purported to be a centromeric sequence (Zhao, Wing et al. 1995; Zhao, Si et al. 1998)). The probes were hybridized to the BAC filters using standard molecular biology techniques to identify BACs that containing these tandem repeats.

### Example 2

### Analysis of Tandem Repeats Identified Using Bioinformatics

[0340] The investigators designed primers to amplify the tandem repeats represented by the consensus sequences of SEQ ID NOs:90-92, shown in Table 6.

TABLE 6
Primers for amplifying tandem repeats of
SEQ ID NOS: 90-92

| SEQ | | |
|---|---|---|
| ID NO | Sequence | Target |
| 100 | gagtcttggg gcattgaaac | SEQ ID NO: 90 Forward |
| 101 | gagctagttg ggctcgctat | SEQ ID NO: 90 Reverse |
| 102 | agtggaaatg ccagacttcg | SEQ ID NO: 91 Forward |
| 103 | gctgatttgg ctttcatgtg | SEQ ID NO: 91 Reverse |
| 104 | ccccgacatt gcagttaaaa | SEQ ID NO: 92 Forward |
| 105 | tggggagtaa gattcgctgt | SEQ ID NO: 92 Reverse |

[0341] Amplified fragments were then prepared as probes for FISH analysis of G. hirsutum chromosomes. If the sequences represented centromeric sequences, then the probes would localize to cytological constrictions that correlate to centromere structures in condensed chromosomes at metaphase on every chromosome (or at least to the A or D sub-genomes).

[0342] FISH was performed essentially as described (Kato, Lamb et al. 2004) using probes labeled with ALEXA FLUOR® 488 (green) or ALEXA FLUOR® 568 (red) dyes (Molecular Probes). Probes were hybridized to chromosome spreads prepared from fixed cotton root tips. To prepare the spreads, cotton root tips were fixed in Carnoy's fixative (3:1 ethanol:glacial acetic acid) and stored at −20° C. Stored root tips were washed in distilled water, then the root caps were rinsed in distilled water, and the meristematic regions dissected out. Protoplasts were prepared enzymatically, and protoplasts spread by dropping onto slides. Following hybridization, slides were counterstained with DAPI (0.04 mg/ml) and the slides examined under a microscope using a Zeiss Axio-Imager equipped with rhodamine, FITC, and DAPI filter sets (excitation BP 550/24, emission BP 605/70; excitation BP 470/40, emission: BP525/50; and excitation G 365, emission BP 445/50, respectively). Grayscale images were captured in each panel, merged, and adjusted with pseudo-color using Zeiss AxioVision (Version 4.5) software.

[0343] Surprisingly, the investigators did not observe localization at centromeric constrictions at every centromere. FIG. 1 shows the results of one of these experiments and shows a co-localization of the tandem repeat of SEQ ID NO:90 with a probe prepared to identify CrGh1. FIG. 1A shows the signal from the probe used to identify the localization of SEQ ID NO:90. FIG. 1C shows the staining that is observed when a probe to CrGh1 (also SEQ ID NO:90). When the images are overlaid, the signals perfectly merge (FIG. 1B), and only few chromosomes are stained at the centromeric constriction.

[0344] While the results for the 210 bp repeat (SEQ ID NO:91) were not the same as those for SEQ ID NO:90, the result was equally surprising. FIG. 2 shows the results of a co-localization experiment. The probe for SEQ ID NO:91 1 only localized to few centromeric constrictions, although closer observation showed that the probe stained throughout the genome. As expected in view of the results shown in FIG. 1, the probe for the 194 bp repeat (SEQ ID NO:90) 2 also localized to one centromeric constriction. However, there was no overlap between the two probes in their staining pattern as shown in FIG. 2. Only diffuse, non-centromeric staining was observed when sample were probed with the 100 bp repeat (SEQ ID NO: 92) (data not shown).

[0345] While it would be expected that tandem repeat sequences commonly present in higher plant functional centromeres, it is possible that the repeats of SEQ ID NOs:90, 91 and 92 can function as centromeres, conferring autonomous segregation in mitosis and meiosis.

### Example 3

### G. hirsutum Centromere Identification Using a Methylation Approach

[0346] In another approach, methylation sensitive technique (e.g., as described in U.S. Pat. No. 7,132,240 and by (Luo, Hall et al. 2004)), was tried to identify cotton centromeres. G. hirsutum L. TM-1 genomic DNA was prepared and digested with the methylation-sensitive endonuclease, BfuCl (New England Biolabs; Ipswich, Mass.). Fragments greater than 10 kb (representing methylated fragments) were purified from agarose gels after electrophoresis, as were unmethylated, smaller (less than 3 kb) fragments. These fragments were then used to probe the BAC library that had been constructed from G. hirsutum L. TM-1 genomic DNA to identify BACs containing methylated, methylated and unmethylated, and unmethylated repetitive DNA. Positive clones included those BACs that hybridized with methylated, but not unmethylated probes. The BACs identified by this method were then used as probes in FISH analysis to determine chromosomal localization.

[0347] The BAC library used in these experiments was constructed from G. hirsutum L. TM-1 genomic DNA was isolated and was digested with the methylation-insensitive Mbol restriction enzyme. The resulting BAC library had 43,008 BACs, representing about 1.8-fold haploid genome coverage.

[0348] To interrogate the libraries, two probes were prepared by digesting cotton genomic DNA. Probes were prepared by digesting cotton genomic DNA with the methylation-sensitive restriction endonuclease BfuC1 and the resulting fragments separated by agarose gel electrophoresis. Fragments were purified from two size ranges: (1) high (>10 kb) and (2) low (<3 kb). The high fragment pool contained sequences that were cut less frequently by the methylation-sensitive restriction endonuclease; therefore, this pool was enriched for highly methylated regions of the genome. The low fragment pool contained sequences that were cut by the methylation-sensitive restriction endonuclease; therefore, this pool was enriched for less-methylated regions of the genome. Two duplicate copies of the cotton genomic BAC library were probed in parallel with the high- and low-methylation fragment pools. Probes were labeled to incorporate ³²P dCTP and were hybridized to filters at 65° C. in 5×SSC, 0.5% SDS, 25 mM sodium phosphate, 5×Denhardt's, overnight, then washed in 0.5×SSC, 0.5% SDS. The filters were washed at 65° C., first for 15 minutes, and then two washes of 1-2 hours each. Signal was detected by exposing the filters to a phosphoimager screen overnight. BAC clones were visually scored for hybridization to each probe, and clones were selected based on strong hybridization signals to high methylation probes and little or no hybridization to the low methalyzlation probes.

[0349] When the investigators observed samples prepared using FISH and probed with BACs 7908, 68C15, 20L23 and 61P1, which had been identified as candidates containing centromeric sequences, they were surprised to see that all probes failed to give characteristic centromeric staining. Instead of strong, centromeric constriction staining, signal was observed to be diffuse over the entire chromosomes. One BAC, BAC_{—}9E14, harboring pXP1-80 (SEQ ID NO:99) (Zhao, Wing et al. 1995; Zhao, Si et al. 1998), did show a more localized staining pattern, but further FISH analysis indicated that the sequence co-localized with NOR 185 rDNA and was therefore determined not to be centromere DNA (data not shown). This result was also surprising: the pXP-180 repetitive element (SEQ ID NO:99) shares many of the characteristics of a centromere repeat in that it is a tandem repeat observed to be present in all tested cotton species and is similar in size to other known centromere repeats (Hawkins, Kim et al. 2006).

### Example 4

### Identification of Cotton Centromeric Sequences Using an Alternative Approach

[0350] While the bioinformatics tandem repeat approach and the methylation approach had both surprisingly failed to identify centromeric sequences, the investigators reasoned that centromeric sequences would be highly represented in the genome, as they had reasoned in the bioinformatics tandem repeat approach (Example 1). However, in this case, the investigators looked for sequence contigs that did not have tandem repeats as previously determined in Example 1, but did have deep reads. Such contigs should have high-copy sequences that are not tandemly arrayed. Using the same conditions to assemble contigs as outlined in Example 1, the investigators examined contigs having deep reads lacking tandem repeats, designed PCR primers to amplify fragments within the contigs, and used these fragments as probes in FISH analysis of G. hirsutum mitotic metaphase chromosomes.

[0351] Two contigs were initially analyzed, 4198 (consensus sequence: SEQ ID NO: 93) and 4199 (consensus sequence: SEQ ID NO:94). SEQ ID NOs:93 and 94 are shown in Table 7, as well as the probes used in FISH analyses. When analyzed by FISH (as described in Example 2) a probe (SEQ ID NO:106) specific for contig 4198 (SEQ ID NO:93) gave only diffuse staining (FIG. 3A). FIG. 3B shows the same chromosome preparation counterstained with DAPI, which stains whole chromosomes.

[0352] However, as shown in FIG. 4A, when a probe (SEQ ID NO:107) specific to contig 4199 (SEQ ID NO:94) was used for FISH analysis, every chromosome was stained in the centromeric region as demonstrated by punctuate staining at the centromeric constriction; FIG. 4B shows the same preparation as FIG. 4A counterstained with DAPI to show the entire chromosomes. FIGS. 4C and 4D show magnified images of fields of FIGS. 4A and 4B, respectively.

[0353] Because every centromeric constriction is labeled by the contig 4199 probe, this observation suggests that contig 4199 comprises centromere DNA.

[0354] To understand the variability within the contig, the investigators determined that the sequences in the contig 4199 were 79% to 99% identical to the consensus sequence of SEQ ID NO:94.

TABLE 7
Consensus sequences for contigs 4198 (SEQ ID NO: 93) and 4199
(SEQ ID NO: 94) of G. hirsutum and FISH probe nucleic acid sequences

SEQ ID NO: 93 (contig 4198)
tttttttttt ttatgtgagt atttgtgaga aaaaagaatt ttccacaatc aaaaaaaaaa 60
aatttacccc ttttttgtgg agaaagggta ttttttttaa aagagacatt ttcggatttt 120
aaatcttttt ttcaaacact ttacaccccc cttgagatta accaaaaaaa ttaattgggc 180
caaggcgcgt tggttttttt tccaatgggg ggaaactttt tttggaaggg gttgattaaa 240
tttaaacaca taggaaacaa ttccccattt ggggattttt tgagtatttg ctggatttta 300
cagcaagctc attcattacc aaatcagtac cctcgggatt taaccgaata tagctctcgt 360
tcaaatgctt cgggacaata gcccggtttt atnaactcac acaatgcctt tcggacttaa 420
cccggattta acaatcgcac gaatgccttc gggacttaac ccggatttaa cactcgcacg 480
aatgccttcg ggacttaacc cggatttaac aactcgcacg aatgcttcgg ggacttaacc 540
cggatttagt atctagcaca aaggccttcg gatcttaatc cggatatatt cacttagcac 600
aaagccttcg ggacttagcc cggacagcat tcaattaatc atgcacatct aacaataatt 660
catagcacat tcatatttca ttttcgttta cgaaactcaa acacaaggca catattgtcc 720
ttgcacattc ggctcaatag ccacacatag agcatgattt aatcacatcg aaatttaaga 780
tctcttactc aagaacttac ctcgggtgtt gtcgaacgat tccgctagct attcaaccac 840
tttttccttc cctttatcgg ttttatttcc cctttgctct tgagcttaat caaacaaata 900
aattgatttc atcattttag gcatcaaaag atgaacacaa ggcacttagc ccatatttat 960
acattagaca ttaaagtctc atacatgcaa aaatcatgca tcaacacaac atattagcta 1020
atttctttcc ccttggccga atatgcatgt ccatttttgg ggtcgatttc aacacttaat 1080
acacacatat acacactagt aaagcatcct cccccttttc atcgatttaa cacatgcatt 1140
gctcatcaac atgcaaagtt acattcggcc ttagcacaca tcttgctagc cgattcttct 1200
ccctttagca accaatgcac atatgtgctc acacaaaaat gctaaaaagg aggttcaaga 1260
atcatcaagc catcatcaca tgcatcatta acaagcttca tattttgcat gcaatggcat 1320
taacacaacc tccacctagg ccgaatctta actcatcctc atgcctcatc accacaacat 1380
caaacatcaa ccaagaatga ttcatccatg gtcaagtgcc atttccatca catagcaaga 1440
tttagaccat gggttaggta gaactcaagc taacaactaa aacatgcatg cctctcatgg 1500
aacatcatca aacatacctt agcagcctag ctacatgcat ggccgaatct cttcaccttt 1560
cttcttcttt cctccttaaa atttttggcc aaggatgaac caaaggatga gaaatttttt 1620
tctttgtttt tctttctagt ttttggcaag catgaagatg agaaaaggat gaacacaaat 1680
ttttctcctt tcttctcttt agctcacggc aatgggggga caaacaccac acacacattt 1740
ttttttcttt tgttttccat ttctttatta cccatactcc ttattttatt cttccactaa 1800
caaaacatgt ttcatgacat gttttgccca tccttccttg tcatggccgg ccactactca 1860
ttaggggggg gaatttgaca tgcaagtccc ccctttgtcc acatgcacta gtaggtcctc 1920
acacattgac ctatcacatt ttagaatttt ctcacataag tcctattgac taaattcaca 1980
tgaaatcaac caaattgaag cttgaaattt tcacacattc ataattacat attctacaca 2040
ataagtatca cattcaaaca tttcggtgac tcggtttagc ggtcccgaaa ccacttcccg 2100
actagggtca actttgggct gtcacaactc tcccccactt aagaaaattt tcgtccccga 2160
aaatcttacc ggtaaatagg tttgggtatc gttctttcat cgagctctcg gtctcccaag 2220
tagcttcctc gatcccgtgt ttgagccata acacctttac tagcggaact cttttgtttc 2280
gcaactcctt cacttcacga gctaggatac gcatcggttc ttcttcatag ctcatgtcgt 2340
cttgaatttc aacctctgat gggctaatta tatgcgatgg atcagatcga tagcgtcgaa 2400
gcatcgagac atgaaagacg tcatgaatct tttcaagctc cgggggcaaa atcaatctat 2460
acgcaaccga gccaactcgc tcggagattt cgtacggccc aatgaatctt gggctcaact 2520
tgcccttacg gccgaacctg agtatctttt tccaaggtga aaccttaagg aacactttgt 2580
ctcccacatg atactcgatg tcttttcgtt tcaaatctgc gtacgatttc tgacgatccg 2640
tggctacctt cagactttca cggattacct ttaccttctg ttcagcatct ctaatcaaat 2700
caactccgaa aattttactt tcaccgagct cggtccaaaa caatggtgta cggcatttac 2760
gaccgtacaa agcctcgtaa ggtgccatct taatacttga ttgaaaacta ttgttgtaag 2820
cgaattcaat caaaggtaaa taccgttccc atgaactact gaactcgagg atgcaacatc 2880
tcaacatatc ctcaagtatc tgaattatcc gctcggattg accatcggtt tgggggtgaa 2940
aagcagtgct aaaatgcaac ttggtaccca gagcttcttg caatttcttc caaaatcgtg 3000
aggtgaatct cggatctcta tccgacacga tagaaacagg taccccgtgt aatctcacaa 3060
tttgataaac gtacaattca gctagtttat ccaatgaaaa atccgtacgt acggggatga 3120
aatgagccga cttagtcagt ctatcaacaa taacccatat cgcatccttc ttacttgctg 3180
acaaaggcag tccggacaca aagtccattg tgactcgatc ccatttccac tcgggtatca 3240
tgatcggctg gagtaatcct gaagacactt gatgttccgc gtttcacttg ttgacatatt 3300
aaacatctcg aaacaaagtc agagatgtcc cgtttcatac catgccacca aaattgacgt 3360
ttcaaatcgt tgtacatttt cgtacttccc cgggtgaatt gacattcggc tacaatgggc 3420
ttcgttcaga atcatcaaaa tgagttccga attccttgga acacacaaac gacttctgaa 3480
cctcaaacaa tcatcatcac caatttgaaa ctccgattcc ttattcggaa cacactcagc 3540
ccgttttgca accaattcat catcaacttt ctgagcttca cgaatttgat gaatcaataa 3600
tggtttggct tttaattcag ctactaacac attgtcaagt agaacagacc agtgcacatt 3660
catcgctcgt aaagcaaaca atgatttccg gcttaaggcg tccgcaacca cattagcctt 3720
tcccgggtgg taatcaatga caagctcgta atctttcaac aactcaagcc aacgtctttg 3780
tcgcagattt aagtctcttt gagtcatcaa atatttgaga cttttgtgat ccgaaaatac 3840
atggcacttt tcaccaaata agtaatgtcg ccatattttt aaagcaaata cgatggcagc 3900
tagttcaaga tcatgggtcg gataattttt ctcatgtggc tttaattgtc tcgacgcata 3960
ggccacaact cgaccttctt gcatcaatac gcaacccaac ccaagtaggg atgcgtcact 4020
ataaatgaca aactcttttc ctgattcggg ttgcactaaa aatggaagct ccatccaaaa 4080
aaatttttca gttgaatcta aaccttttct gacatttctc cgtccattcg aacttaacat 4140
ccttttgaag tagcttcgtc attggtgtgg ctatcatcga gaaacctttt acaaatcgtc 4200
ggtaataacc ggtgagcccc aggaagctcc gaacttcggt aatatttctt ggaggcttcc 4260
agttaagtat ggctgaaatt ttgctcgggt caactcgaat acccgatgcg gatcccacat 4320
gacccaaaga tgctaacctc ttttaaccag aactcacact tactgaactt agcatataac 4380
tgcttatccc gtaaaattta caacactaat ctcaggtgct cagcatgttc agtctcatct 4440
cttgaataga ccaagatgtc atcaatgaac acaactacga accgatccaa atatgggtct 4500
gaggatccga ttcatcaaat ccataaatac cgcaggggca ttagtgagcc aaaacggcat 4560
cactaagaac tcgtagtaac agtatctagt tctaaaagca gttttgggta tatccgaatc 4620
tcgaattcgc aattggtaat aactcgatct caaatctatc tttcaaaaca ctgaggctcc 4680
ctttagttga tcaaacaaat catcaatacg cggtaacgga tatttattct ttatcgtcac 4740
tttattcagc taacgatagt caatgcacaa cctcatggtt ccgtccttct ttttcacaaa 4800
caatactggt gcaccccaag gtgagaaact tggtcgagtg aaacctctat ccgtcaactc 4860
ttgcaactga gctttcaaat gttttaactc ggttggttcc atacgatacg gagctatcga 4920
aattggcata gttccaggta caagctcaat accaaactct atctcccgaa caggtggcaa 4980
acccggtaac tcttcaagaa acacatccgg gtattcacag atcactcggc accgattcgg 5040
gtttcttttc taactccttg tcatcaagta catacgcgag gtatgcttcg cacccttttc 5100
ttacatattt ctgggccaac attgccaata ttacagctgg caatcccctt aagtccgtag 5160
actcaattcg aattatctcg ttatttgcgc acctcaaatc aatagtcttt tcttttgcaa 5220
ttcacaactg catcatgaac ggtcaaccaa tctttttcga gaataacatc aaattcatca 5280
aacggaaaaa gcatcaagtc cgccggaaaa cgggaacctc gaattactag ggggcatttc 5340
ttacacactt tgtcgacaag cacgtaacga cccaagggat ttgacaccag aattacgaac 5400
tcagtagact caataggtaa agtcttactg gatgctaagg tttcgcatat ataagaatga 5460
gtagaaccag ggtcaatcaa agcaatcaca ttagtatcaa agagagtaaa agtaccggta 5520
ataacatctg gcgaggaagc atcctcgcgt gcgcgtatag cataagcctt agcaggagcg 5580
cgagcctcgg atctagtcgt agcatctata gatcctctct gaccacccct agcattgccc 5640
gtatttctag atggtctacc tcgaacagtg gtagcacccg gtttctcgct ttgatttata 5700
ttctgttcag acaacctcgg gcaatccttt attgaagtgg tcaactgatc cgcacttgta 5760
acagggagcg atcatggaat ctacaactcc ccgaatgcca tttaccacaa tactggcact 5820
ctgctctgtc tcgacgatca tttccaccac tggcgaccga agtgactcgt gcactcacag 5880
ggggtcgatc gcgatctcgt ctagaaaagc cagaaagtgt ttctagatcg gcctaaatca 5940
tctctaaaat ttcttcgatg actgtttgaa agggctttcc cgaagatctc ttacgaaact 6000
cttttgctcc tacatcagct ttccttttat ccttactgag ctcctcggct ttgcaagctc 6060
gctcgacaag taccacaaat tctcggattt ctaaaatgcc aacacacagc ttttatatca 6120
tcattcagtc catcctagaa ccatttacac atcacggcct ctgaagaaat gcattctcgc 6180
gcgtatcggc taagcctcac aaattttcgt tcaatagtcg gtaaccgaca tggaaccttg 6240
tttgagttca agaaattcct ttcgtttttg gtcgatgaat ctatgactga tatacttctt 6300
tcaaaactca aaaaaaagaa ctcccaagtt acttactctc tgggcacaac agaagtcaac 6360
gtattccacc aatagtaggc agaatcatgt agcaaggaga taatacactt taggcactca 6420
tcgggtgtgc aagatagctc atcgagtacc cgaatagtgt tgtccaacca aaattcagct 6480
tgctcggcat catcgctatc cgtagcctta aattcagtag ccccgtgttt tcgaattctg 6540
tcaattgggg gcttacttga ccttatttgg tcagttgccg gaggtattgt aggtgcgggg 6600
gtggcattag ttcggaatgg aggttgctgc gaacagccgt attagttcga atgtattggt 6660
tgaaacaatc attcatcatg ctataaaaag cttgtctagc ttcatcattt ggattactag 6720
caataggttg agagtccgcc ggagctgtcc cttgtgcggg agcaggcgct acactctcaa 6780
gatcatcagc taccgctcgg tcgggattgg gatccattac tataaataaa cacatttgca 6840
aatgtcagaa atcaccacac tatcaattaa tcacataaaa tggcatgtat agttagaccc 6900
caacacatta cggtagtcct agaaacgact accaccgtag ctctgatacc aatcaaatgt 6960
aacaccccga acccgagatc gtcaccggag tcggacacga gatgttaaca aactttgaaa 7020
aaaatttttt ccagacactg cccagtctga gtactagtcg cttcaaaaat catatcttga 7080
gtttcacaac tcaaaaatca gttttgtatt tttccctgaa acaagactca tgtccccacc 7140
tatggatttt tttctggaat ttttggttgg gccaactagt acagtttatt agtcaaagtc 7200
tcccatgtta caggggtcga ctacactgac cttttcccat tacgactggg atatctctct 7260
gcacagagct tcaatactga tgccgtttgt ttctatggaa actagactca gagaggaatc 7320
catacatata tggtatgacc cctaattatc tctggtcaat ttatagtgaa tttccaaagg 7380
cggaacagtg aatcccagaa actgttctgg ccctgttcca caagaaccgg aatatctctt 7440
tctgtactgt tcctataatt gtttcgttac ttccatatga aagtagattc atcaaggttt 7500
gattacataa tttattcact atttaattcc actcctacga atttatgtga tttttcaatt 7560
ctacaccact gttgctgtca aaatctgttt tcaagataaa ctttacctat tttgtggtca 7620
ccatggacca actaggattt tgccctacat aggtccacat gtgatcatat ttagccattc 7680
caatggctga tcattagccc aacacttcca tttcaaacca tagtcacatc atgaaaccat 7740
atatatacat acatacacac aaatggtcta atgccatact ccacttttac aagccatttt 7800
cgcatggctg tacacttata catttcataa agtactcgaa agacaacaat gggtagtcct 7860
atacatgcca tatcaaaatt caaccaaaat agtacccaaa agagcctttg aaagtggggg 7920
gcgacttcca ctttcaaatt cccaagtccg aatagctgga aaaccaaaaa tcttttaaaa 7980
aaaagaacca atgtaaacag taagccattt tttgcttata aagtttgagc aaagaaatcc 8040
cgccttaaaa aaaaaattcc aacaatttag ctaaagggaa aatttttata aaatcccatt 8100
ttttcgatat ttaaattttg tttccaaaaa ttaaaaaacc ctttgggtaa ataacccaaa 8160
aaaaataaat tataccaaaa gggcgggtac cctgttttat ctcctggggg ggaaaaaatt 8220
ttttttttta gagggcgtgc gatatatatt tttcaaacaa acacctatta taaaattctc 8280
cccccctaat tttgggtgga tggttttt 8308
SEQ ID NO: 106 (probe for contig 4198)
gacatgtttt gcccatcctt ccttgtcatg gccggccact actcattagg ggggggaatt 60
tgacatgcaa gtcccccctt tgtccacatg cactagtagg tcctcacaca ttgacctatc 120
acattttaga attttctcac ataagtccta ttgactaaat tcacatgaaa tcaaccaaat 180
tgaagcttga aattttcaca cattcataat tacatattct acacaataag tatcacattc 240
aaacatttcg gtgactcggt ttagcggtcc cgaaaccact tcccgactag ggtcaacttt 300
gggctgtcac aactctcccc cacttaagaa aattttcgtc cccgaaaatc ttaccggtaa 360
ataggtttgg gtatcgttct ttcatcgagc tctcggtctc ccaagtagct tcctcgatcc 420
cgtgtttgag ccataacacc tttactagcg gaactctttt gtttcgcaac tccttcactt 480
cacgagctag gatacgcatc ggttcttctt catagctcat gtcgtcttga atttcaacct 540
ctgatgggct aattatatgc gatggatcag atcgatagcg tcgaagcatc gagacatgaa 600
agacgtcatg aatcttttca agctccgggg gcaaaatcaa tctatacgca accgagccaa 660
ctcgctcgga gatttcgta 679
SEQ ID NO: 94 (contig 4199)
tgaaggcaga gagaaagaaa aaaaagagga ataaggctat agaggagaat atgaggtagg 60
agaagagggt aatggggttg agaaaaatag aaggggacac agagagatta gagaggcaaa 120
gagaagatag agctatggtg tgtagataag agttagaaaa taatattcga tgcatagcta 180
gttaaggata aagagattgg tactgagtgt taagttgagt gttttctcgg agagagttga 240
aaggaaaagc ggacctgcaa ctcttcgcac gcggccgcag ggaagaagag tataacagag 300
gtaaaataga aaataaaaaa tataaggggt aaaataaaat gatatcgaag ggatagcata 360
aaaaaggtct ccaaggtaaa gcgttaaaag ttatttttta atcgtcataa attactaggg 420
gcattagaag aggcgatagt cttaaatacc cattcaaaca attacaaatt taggtataaa 480
gtataatttt cggttcatcc cttttcccgt attggaattt gatgataatg gctttttaaa 540
acaattttag ggaatataat tgaaccatgt aattcatcaa gtctaggaat tggatgtcta 600
tactttactg ttattttgtt gattgggcgg caaacaacac acattctata cgtaccatct 660
ttcttcggta ccaataagac aggaacggca caatggctta ggctctcacg aatgtaccct 720
ttgtctagta actcctcaac ttgcctttgc aattcctttg tctcctcggg attgcttcta 780
taggctggtc gatttggcat tgaagctcct ggtactaagt caatctagtg ttctatccca 840
cgtaaaggtg gtaaaccttt aggggcctca ctaaaaacat cctcataatc ctgcaaaaga 900
cattgaacca cactaggcaa attttcatta atgttagata gagataaata gttttgccta 960
aacctcacaa ggatacaagg ctgtttattg agtagggctc tccgcacatc tttttttgtt 1020
gcaattaaaa ttttcactct agttttatca cttgcggatt cactcacctt tgattcattt 1080
aaaatttgac ttttttcact actagcatct tttctctctg tcttttttat ttgtcctttc 1140
ttcctcaccc cctcacaaaa tttcatcatt tttaattgat ctttatatac atcattggga 1200
tttaaaagag caaaagtgaa ttttcggcct ttaaacacaa gagagcttac ctttgtgtgt 1260
aacatcacga tcaaattgcc aaggccgtcc aaggagaaag tgtgccgcat gcattgatga 1320
ccacattaca ccatagatca tcctcgtaat tcttaagcta tatagtgagt gaggtactat 1380
tttgtaaact ttaactttcg agcaattcat aagccactga aggtgatacg gcttagggtg 1440
ctcgatacaa ggtaacttta aggaatccac caaatagctg ctaactacat tcgaacaact 1500
cccactatca ataataagtg aacataagtt accttttata aaacacccta gaatggaaaa 1560
tattggtcct ttggttctca aaatcgtctt tcatttggat gttaagggtg cggtttacta 1620
ccatcttatt ttttttcctc tttttttttg aaatacctgt aaaacaaata ctcaacactc 1680
aaaagaaaaa ttagcaaacc tcaccgttag tcactcaaaa agaaaaatca aattctcaat 1740
gaggtagaat tcagtcttgt gagttcttta gtagagtcta tatcaaccaa ttagaaagtg 1800
tatgaaccga aactaccaaa gagtcctaat ttgcactaag atgccaaaaa ctgacgagac 1860
accaattaat ttgtgttgca ccgaggaaga attgtgcaca ccttaaaatc ctactaacac 1920
aagaaacaag aaggtgttag atagtgtaaa ggaagaataa aggcaaacaa atgaaaacct 1980
acagctaaga atcaataaaa attgctgaaa tcgaaaaacc caaaaaactg cggagtaact 2040
tgacaacttc gttcgaggtg ttcccgatct ccaaaaatca caaaattaaa tctagaatgt 2100
ccttaaatat tgaatttttg atctggaaag tttgggcacc aaactcaacc cgctgaatct 2160
tttttaaaat ttttatttga tttcgtcttt ttcaattttt ttgacttttt cgaatgacgt 2220
ttttgcggga aatatttttt tatattcaat aacagtgcca aaaatatgta tgtaaaattt 2280
tagatcaatc agacaacgtt tacccactca aatgaatttt ttttgaacaa tttttctggg 2340
taaaactgct gtttgtgctt taaaaaatag agatcagttt agaaatcaac caggaacacc 2400
caaaacgccc aaaatctgat accaaatgat acgggggttg cgcgcggacc aagatcgagt 2460
tgccaagtca cgagaaactc ctaattattt taatatggaa attcggtcaa aggtcatttt 2520
atctgggact cttggactga atattgacat aaaaatttaa actaagtaaa taaataaata 2580
aataaagaaa aataaaaata aaactttaca acttgggcca ctttgacaat ttggcctgat 2640
ttttttaaca atttggcctg attttcaact aagtatggat ggatttcttg attgggctgg 2700
gaatttgctt attgggcctc gccttcaaga atttgggctt ttgtgactcg tatcattccc 2760
cccttcctca aaaagattcg tcctcgaatc tgaaaaatca aatgaactcg actttcctct 2820
atcgaacggg actaatggca attgagtcca ctgaaaagaa tagccatgag atagtaaata 2880
gcaacggaaa caagcttgta gtccaatcat aagcataaca gaacaggtat aacgcatgtg 2940
aatggacaga ttcagattac catgcaaaca atctaattta ctcaccactg cctcgtcaaa 3000
tatttgaaac aaagatggac atgttttaag gcattcagtc gtctcacatt gttcccacaa 3060
accatgaata aattgcgagt aataaatcaa atggtaaaca taatcgtcac aagtaggtat 3120
ttgaaaagat tcacatggtt cacagagttg cataatcata ccatgcatta atcgacggtc 3180
tatagattca ctcacacatg cattatcaaa aacaagaatc tttttatcaa ccatcaaaac 3240
agatagatca tcaataaata aaataggaca gtcaagcacg tttcgatcta agtgttcatc 3300
aacacgatct ttatcactat ccgaggagta caaaagtgtt tcaaaggttt caagcatctt 3360
acctcgataa gcagaagaat aagggtcgat tttacctttt tcatttaaaa caaaccttcg 3420
ctcatcgggg gcatagtgta gtcgaatctc cgttgttgag ttaacctttg tcaaatggaa 3480
ctcaaacttc atgtacaacc acataaactg tttaaggcac gaatataaat tgaaaacaaa 3540
tttggaaaat ttcgttacct tattctccaa aacagatttg gacaaattcg aggattttac 3600
acaaggtaaa tcaagagaat aacaaatcac gcttcttttc gtaatgactt tatcaaccac 3660
aatcgaagag taacaattaa tcggatcaaa atgaggggat cttttaagaa ctaagtcacc 3720
aaaagtttta tcaataattt tcaaatctgc actggactcg gtttctaaaa tttccttacc 3780
tcgcttacct tcgggatcat gtagtgtgat ttcatctttg cctaagttga tcgtatgaaa 3840
gcgtctttca tttgagaggt attgaagttg aaagttatct ttcgatcttt cgggaacctg 3900
aaaagtagca acacaagaaa aattcatatc ttggttagtg gaaacattcc tcactaccct 3960
ttccacgtct ttttcttttg tttctttttc taattcattt tctcttcttt cttcaatttc 4020
tttttcaatt ttcttttctg tttcacattc cttttcactc tcaatctctt tttgctcttt 4080
ttcattctct ttttcttttt cctcacttgt tttaacagaa tttttcagtt tgatttggtc 4140
ctcatggact tgttccggag tgagcggcac taaggtgagt ttctttcctt gatgcttgaa 4200
agaataccta ttggtacgac catcgtgagt gacttttcga tccagttgcc atggttctcc 4260
tagcaacaaa tggcaggctt gaataggcat tacgtcgcac acaacttcgt cttgatactt 4320
accgatagaa aaggcgatgc gcacttgttg agtgacccta aattggcctt cgttgctaag 4380
cccttgtagt tgataaggtt gtggatgctt ggtagtggtt aagcaaagct tttccaccat 4440
cgtcgtgctg gctatgttcg agcaactttc accatcaata ataactctac aaagcttacc 4500
ttgtacatgg cagcgagtat gaaagagatg ttctcgttgc tgctcgctct ttggttttgc 4560
caaagatgat tgtccacgat catgaaaatc atcatccatt ctagggacac gttgagggct 4620
gcacctatag ggctggttat ccctatcttc cttaattgga tctcgatatt gatgtttttg 4680
attcactcgt acctcattca aagtagtatt caatgcttga agtgtagcat ttatttgtgt 4740
gattgcagca gtatgttcgt ctaactgttg ttggactttc ataagtgcat cattattatc 4800
acctttagac atcttcaaaa cctgtaaaaa gtaaacactc aacactcaaa aataaaagtt 4860
agcaaacctc accattaatc actcaaaaag aaaaatcaaa ttctcaatga ggtcgaattc 4920
aatcttgtga gttctttatc agagtttata tcaaccaatt agagagtgtg aaccaaacta 4980
ccaaagaatc ctaatttgca ctaggatgcc aaaaactgac gagacaccaa gtgattcgtg 5040
ttgcaccgag gaaggagttg tgcacacgtg taaatccaac taacacaaga aacaagaagg 5100
tgttagataa cgtaacggaa gaataaaagc aaacaaatga aaacctacag ctaagaatca 5160
ataaaaattg ctgaaaatag aaaacccgaa aaactgcgga gtaacttgac aacttcgttc 5220
gaggtgttcc tgatctcaaa aaatcacgaa attaaatctt tgaatgttct tatatataga 5280
attttttatc tggaaatttt gggcaccaaa ttcaaccccg ctgaatcttt ttttaaattt 5340
ttaattgaat ttcatctttt ttttattttt ttggactttt ttgactaatt tttttggggg 5400
caataatttt tttttatttt caatccccag gggcccaaaa actgtgttgg taaaatattt 5460
tcaaaataaa tcgaaaaaac ttttaacccc cctccaaatg gaattttttt tttaaaaaaa 5520
tttttttttg gggaaaaaac tgtgctggtt ttttggtttt taaaaaaaaa ataaaaaatt 5580
tcgtttttaa aaaaatctaa ccccagaaaa aaccccccaa aaaacccccc aaaaaaattt 5640
taatacccca agggggtata acgggggacg ccccccgcgg gacaccccaa aaataacgca 5700
agttttttcc ccaagaatct ccccccggaa aaaaaaactc cccccttctc taaaaaaaaa 5760
aaaaaatttt tcttataaaa aaaaaaaa 5788
SEQ ID NO: 107 (probe for contig 4199)
tcaaatctgc actggactcg gtttctaaaa tttccttacc tcgcttacct tcgggatcat 60
gtagtgtgat ttcatctttg cctaagttga tcgtatgaaa gcgtctttca tttgagaggt 120
attgaagttg aaagttatct ttcgatcttt cgggaacctg aaaagtagca acacaagaaa 180
aattcatatc ttggttagtg gaaacattcc tcactaccct ttccacgtct ttttcttttg 240
tttctttttc taattcattt tctcttcttt cttcaatttc tttttcaatt ttcttttctg 300
tttcacattc cttttcactc tcaatctctt tttgctcttt ttcattctct ttttcttttt 360
cctcacttgt tttaacagaa tttttcagtt tgatttggtc ctcatggact tgttccggag 420
tgagcggcac taaggtgagt ttctttcctt gatgcttgaa agaataccta ttggtacgac 480
catcgtgagt gacttttcga tccagttgcc atggttctcc tagcaacaaa tggcaggctt 540
gaataggcat tacgtcgcac acaacttcgt cttgatactt accgatagaa aaggcgatgc 600
gcacttgttg agtgacccta aattggcc 628

### Example 5

### Characterization of G. hirsutum Centromeric DNA Structure

[0355] In these experiments, the investigators examined contig 4199 (SEQ ID NO:94) to discern structure t characteristic of the G. hirsutum centromere.

[0356] The investigators examined the sequence of the 4199 contig and found a sequenced BAC (GeneBank #EF457753) that contained sequence similar to contig 4199. By analysis of the BAC sequence, the investigators discovered the following elements, which are represented diagrammatically in FIG. 5A. As shown in FIG. 5A, the centromeric sequence comprises a CenCORE (represented by an oval) of approximately 2836 bp and two substantially identical flanking sequences, CenFR, each about 982 bp (represented by the arrows) (sequence analysis showed that each of CenFR (long terminal repeats (LTRs) was flanked by a TG/CA inverted repeat at each end). The CenCORE sequence is represented by SEQ ID NO:95; and the CenFR sequence by SEQ ID NO:96. SEQ ID NOs:95, 96 and 97 (the latter representing the sequence of the whole construct, designated “CRG1” and sometimes referred to as “CEN”) are shown in Table 8.

TABLE 8
Consensus sequences for CenCORE (SEQ ID NO: 95), CenFR (SEQ ID NO: 96)
and CRG1 (SEQ ID NO: 97) of G. hirsutum

SEQ ID NO: 95 (CenCORE)
ttcccccctt cctcaaaaag attcgtcctc gaatctgaaa aatcaaatga actcgacttt 60
cctctatcga acgggactaa tggcaattga gtccactgaa aagaatagcc atgagatagt 120
aaatagcaac ggaaacaagc ttgtagtcca atcataagca taacagaaca ggtataacgc 180
atgtgaatgg acagattcag attaccatgc aaacaatcta atttactcac cactgcctcg 240
tcaaatattt gaaacaaaga tggacatgtt ttaaggcatt cagtcgtctc acattgttcc 300
cacaaaccat gaataaattg cgagtaataa atcaaatggt aaacataatc gtcacaagta 360
ggtatttgaa aagatttaca tggttcacag agttgcataa tcataccatg cattaatcga 420
cggtctatag attcactcac acatgcatta tcaaaaacaa gaatcttttt atcaaccatc 480
aaaacagata gatcatcaat aaataaaata ggacagtcaa gcatgtttcg atctaagtgt 540
tcatcaacac gatctttatc actatccgag gagtacaaaa gtgtttcaaa ggtttcaagc 600
atcttacctc gataagcaaa agaataaggg tcgattttac ctttttcatt tgaaacaaac 660
cttcgttcat cgggggcata gtgtagtcga atctccgttg ttgagttaac ctttgtcaaa 720
tggaactcaa acttcatgta caaccacata aactgtttaa ggcaagaata taaattgaaa 780
acaaatttgg caaatttcgt taccttattc tccaaaacag atttggacaa attcaaggat 840
tttacacaag gtaaatcaag agaataacaa atcacgcttc ttttcgtaat gactttatca 900
accacaatcg aagagtaaca attaatcgga tcaaaatgat gggatctttt aagaactaag 960
tcaccaaaag ttttatcaat aattttcaaa tctgcactgg actcggtttc taaaatttcc 1020
ttacctcgct taccttcggg atcatgtagt gtgatttcat ctttgcttaa gttgatcgta 1080
tgaaagcgtc tttcatttga gaggtattga agttgaaagt tatctttcga tctttcggga 1140
acctgaaaag tagcaacaca agaaaaattc atatcttggt tagtggaaac attcctcact 1200
agcctttcct cgtctttttc ttttgtttct ttttctaact cattttctct tctttcttca 1260
acttcttttt caattttctt ttctgtttca cattcctttt cactctcaat ctctttttgc 1320
tctttttcat tctctttttc tttttcctca cttgttttaa cagaatttct cagtttgatt 1380
tggtcctcat ggacttgttc cggagtgagc ggcactaagg taagtttctt tccttgatgc 1440
ttgaaagaat acctattggt acgaccatcg tgagtgactt ttcgatccag ttgccatggt 1500
tctcctagca acaaatggca ggcttgaata ggcattacgt cgcacacaac ttcgtcttga 1560
tacttaccga tagaaaaggc aatgcgcact tgttgagtga ccctaaattg gccttcgttg 1620
ctaagccctt gtagttgata aggttgtgga tgcttggtag tggttaagca aagcttttcc 1680
accatcgtcg tgctggctat gttcgagcaa ctttcaccat caataataac tctacaaagc 1740
ttaccttgta catggcagcg agtatgaaag agatgttctc gttgctgctc gctccttggt 1800
tttgccaaag atgattgtcc acgatcatga aaatcatcat ccattctagt gacacgtcga 1860
gggccgcgcc tttggggttg gttatcccta tcttccttaa ttggatctcg atattgatgt 1920
ttttgattca ctcgtatctc attcaaagta gtattcaatg cttgaagtgt agcatttatt 1980
tgtgtgattg cagcagtatg tccatctaac tgttgttgga ctttcataag tgcatcatta 2040
ttatcacctt tagacatctt caaaacctgt aaaaaataaa cactcaacac tcaaaaataa 2100
aagttagcaa acctcaccat taatcactca aaaagaaaat tcaaattctc aatgaggtcg 2160
aattcaatct tgtgagttct ttatcagagt ttatatcaac caattagaga gtgtgaacca 2220
aactaccaaa gaatcctaat ttgcactatg atgccaaaaa ctgacgagac accaattgat 2280
tcgtgttgca ccgaggaaga agttgtgcac acgtttaaat cctactaaca caagaaacaa 2340
gaaggtgtta gataacgtaa aggaagaata aaggtaaaca aatgaaaacc tacagctaag 2400
aatcaataaa aattgctgaa aacagaaaac ccgaaaaact gcggagtaac ttgacaactt 2460
cgttcgaggt gttcccgatc tccaaaaatc acgaaattaa atctggagtg tccttatata 2520
tttaattttt gatctggaaa atttgggcac caaattcaac ccgctgaata tttttttaat 2580
tttttattgg atttcgtctt ttttcaattt tttgactttt tcgacttatt tttttgcggg 2640
aaatattttt gtatattcaa taacagtgcc aaaaatatgt atgtaaaatt tcagatcaat 2700
cagaaaacgt ttacccactc aaataaattt ttttcgaaaa tttttctggg taaaactgct 2760
gtttgtaatt taaaaaatag agatcagttt agaaatcaac caagaacacc caaaacgccc 2820
aaaatctgat accaaa 2836
SEQ ID NO: 96 (CenFR)
tgatacgggg ttgcgcgcgg accaagatcg agttgccaag tcacgggaaa ctcctacgaa 60
aacccttaaa caattagatc tgaaacgaaa cagaaaatta aaagattaga tttttgaatt 120
ttcagatctg aaataaaatc cccaaatcag caaagaatca aattgagaat agaaataagt 180
gttagggttc ttgaaaccct caaggagatt gtgattctgc ccaattgaac actaagatag 240
ttttccccaa atttcgacaa tctaatttca cccaaaaaga gtatggaaaa accctagaaa 300
ttggggattt ttgggctgat tccttaagat agaaaaaggc tgaaaacaca ataagaacag 360
aaaatagatt agataatgat tcagcacaag tagaaataaa gaaagaattg acagtaagaa 420
attaaaagat aagtcctaag aagccttgaa atctcgaaag atctcacaac tcccttcaaa 480
cggctctaat ctcccctcca aagaatatca atggcaagaa gaaggttgaa gatggctccc 540
acaatcaaaa agattgttaa aacaacttct aaagaaaact caagagaaaa tccttgaaga 600
actcaaagag aattttcact caaatcaaat ctgaaatttt caatgtaatt gtaatgtaat 660
gtagggtggc tggccaagcc atataaatag gcctttcaaa tgttttccta atttaattag 720
aacactaaaa ctaaaactaa aaaaaactcc taattatttt aatatggaaa ttcggccaag 780
ggtcttttat ttgggactct tggactgaat ataaaaattt aaactaaata aaataaataa 840
ataaaaataa aactttacaa cttgggccac tttgataatt tggcctgatt ttcaactaag 900
tatgggtgga tttcttgatt gggctgagaa tttgcttatt gggcctcgcc ttcaagaatt 960
tgggcttttg tgactcgtat ca 982
SEQ ID NO: 97 (CRL1)
tgaaggcaga gagaaagaaa aaaaagagga ataaggctat agaggagaat atgaggtagg 60
agaagagggt aatggggttg agaaaaatag aaggggacac agagagatta gagaggcaaa 120
gagaagatag agctatggtg tgtagataag agttagaaaa taatattcga tgcatagcta 180
gttaaggata aagagattgg tactgagtgt taagttgagt gttttctcgg agagagttga 240
aaggaaaagc ggacctgcaa ctcttcgcac gcggccgcag ggaagaagag tataacagag 300
gtaaaataga aaataaaaaa tataaggggt aaaataaaat gatatcgaag ggatagcata 360
aaaaaggtct ccaaggtaaa gcgttaaaag ttatttttta atcgtcataa attactaggg 420
gcattagaag aggcgatagt cttaaatacc cattcaaaca attacaaatt taggtataaa 480
gtataatttt cggttcatcc cttttcccgt attggaattt gatgataatg gctttttaaa 540
acaattttag ggaatataat tgaaccatgt aattcatcaa gtctaggaat tggatgtcta 600
tactttactg ttattttgtt gattgggcgg caaacaacac acattctata cgtaccatct 660
ttcttcggta ccaataagac aggaacggca caatggctta ggctctcacg aatgtaccct 720
ttgtctagta actcctcaac ttgcctttgc aattcctttg tctcctcggg attgcttcta 780
taggctggtc gatttggcat tgaagctcct ggtactaagt caatctagtg ttctatccca 840
cgtaaaggtg gtaaaccttt aggggcctca ctaaaaacat cctcataatc ctgcaaaaga 900
cattgaacca cactaggcaa attttcatta atgttagata gagataaata gttttgccta 960
aacctcacaa ggatacaagg ctgtttattg agtagggctc tccgcacatc tttttttgtt 1020
gcaattaaaa ttttcactct agttttatca cttgcggatt cactcacctt tgattcattt 1080
aaaatttgac ttttttcact actagcatct tttctctctg tcttttttat ttgtcctttc 1140
ttcctcaccc cctcacaaaa tttcatcatt tttaattgat ctttatatac atcattggga 1200
tttaaaagag caaaagtgaa ttttcggcct ttaaacacaa gagagcttac ctttgtgtgt 1260
aacatcacga tcaaattgcc aaggccgtcc aaggagaaag tgtgccgcat gcattgatga 1320
ccacattaca ccatagatca tcctcgtaat tcttaagcta tatagtgagt gaggtactat 1380
tttgtaaact ttaactttcg agcaattcat aagccactga aggtgatacg gcttagggtg 1440
ctcgatacaa ggtaacttta aggaatccac caaatagctg ctaactacat tcgaacaact 1500
cccactatca ataataagtg aacataagtt accttttata aaacacccta gaatggaaaa 1560
tattggtcct ttggttctca aaatcgtctt tcatttggat gttaagggtg cggtttacta 1620
ccatcttatt ttttttcctc tttttttttg aaatacctgt aaaacaaata ctcaacactc 1680
aaaagaaaaa ttagcaaacc tcaccgttag tcactcaaaa agaaaaatca aattctcaat 1740
gaggtagaat tcagtcttgt gagttcttta gtagagtcta tatcaaccaa ttagaaagtg 1800
tatgaaccga aactaccaaa gagtcctaat ttgcactaag atgccaaaaa ctgacgagac 1860
accaattaat ttgtgttgca ccgaggaaga attgtgcaca ccttaaaatc ctactaacac 1920
aagaaacaag aaggtgttag atagtgtaaa ggaagaataa aggcaaacaa atgaaaacct 1980
acagctaaga atcaataaaa attgctgaaa tcgaaaaacc caaaaaactg cggagtaact 2040
tgacaacttc gttcgaggtg ttcccgatct ccaaaaatca caaaattaaa tctagaatgt 2100
ccttaaatat tgaatttttg atctggaaag tttgggcacc aaactcaacc cgctgaatct 2160
tttttaaaat ttttatttga tttcgtcttt ttcaattttt ttgacttttt cgaatgacgt 2220
ttttgcggga aatatttttt tatattcaat aacagtgcca aaaatatgta tgtaaaattt 2280
tagatcaatc agacaacgtt tacccactca aatgaatttt ttttgaacaa tttttctggg 2340
taaaactgct gtttgtgctt taaaaaatag agatcagttt agaaatcaac caggaacacc 2400
caaaacgccc aaaatctgat accaaatgat acgggggttg cgcgcggacc aagatcgagt 2460
tgccaagtca cgagaaactc ctaattattt taatatggaa attcggtcaa aggtcatttt 2520
atctgggact cttggactga atattgacat aaaaatttaa actaagtaaa taaataaata 2580
aataaagaaa aataaaaata aaactttaca acttgggcca ctttgacaat ttggcctgat 2640
ttttttaaca atttggcctg attttcaact aagtatggat ggatttcttg attgggctgg 2700
gaatttgctt attgggcctc gccttcaaga atttgggctt ttgtgactcg tatcattccc 2760
cccttcctca aaaagattcg tcctcgaatc tgaaaaatca aatgaactcg actttcctct 2820
atcgaacggg actaatggca attgagtcca ctgaaaagaa tagccatgag atagtaaata 2880
gcaacggaaa caagcttgta gtccaatcat aagcataaca gaacaggtat aacgcatgtg 2940
aatggacaga ttcagattac catgcaaaca atctaattta ctcaccactg cctcgtcaaa 3000
tatttgaaac aaagatggac atgttttaag gcattcagtc gtctcacatt gttcccacaa 3060
accatgaata aattgcgagt aataaatcaa atggtaaaca taatcgtcac aagtaggtat 3120
ttgaaaagat tcacatggtt cacagagttg cataatcata ccatgcatta atcgacggtc 3180
tatagattca ctcacacatg cattatcaaa aacaagaatc tttttatcaa ccatcaaaac 3240
agatagatca tcaataaata aaataggaca gtcaagcacg tttcgatcta agtgttcatc 3300
aacacgatct ttatcactat ccgaggagta caaaagtgtt tcaaaggttt caagcatctt 3360
acctcgataa gcagaagaat aagggtcgat tttacctttt tcatttaaaa caaaccttcg 3420
ctcatcgggg gcatagtgta gtcgaatctc cgttgttgag ttaacctttg tcaaatggaa 3480
ctcaaacttc atgtacaacc acataaactg tttaaggcac gaatataaat tgaaaacaaa 3540
tttggaaaat ttcgttacct tattctccaa aacagatttg gacaaattcg aggattttac 3600
acaaggtaaa tcaagagaat aacaaatcac gcttcttttc gtaatgactt tatcaaccac 3660
aatcgaagag taacaattaa tcggatcaaa atgaggggat cttttaagaa ctaagtcacc 3720
aaaagtttta tcaataattt tcaaatctgc actggactcg gtttctaaaa tttccttacc 3780
tcgcttacct tcgggatcat gtagtgtgat ttcatctttg cctaagttga tcgtatgaaa 3840
gcgtctttca tttgagaggt attgaagttg aaagttatct ttcgatcttt cgggaacctg 3900
aaaagtagca acacaagaaa aattcatatc ttggttagtg gaaacattcc tcactaccct 3960
ttccacgtct ttttcttttg tttctttttc taattcattt tctcttcttt cttcaatttc 4020
tttttcaatt ttcttttctg tttcacattc cttttcactc tcaatctctt tttgctcttt 4080
ttcattctct ttttcttttt cctcacttgt tttaacagaa tttttcagtt tgatttggtc 4140
ctcatggact tgttccggag tgagcggcac taaggtgagt ttctttcctt gatgcttgaa 4200
agaataccta ttggtacgac catcgtgagt gacttttcga tccagttgcc atggttctcc 4260
tagcaacaaa tggcaggctt gaataggcat tacgtcgcac acaacttcgt cttgatactt 4320
accgatagaa aaggcgatgc gcacttgttg agtgacccta aattggcctt cgttgctaag 4380
cccttgtagt tgataaggtt gtggatgctt ggtagtggtt aagcaaagct tttccaccat 4440
cgtcgtgctg gctatgttcg agcaactttc accatcaata ataactctac aaagcttacc 4500
ttgtacatgg cagcgagtat gaaagagatg ttctcgttgc tgctcgctct ttggttttgc 4560
caaagatgat tgtccacgat catgaaaatc atcatccatt ctagggacac gttgagggct 4620
gcacctatag ggctggttat ccctatcttc cttaattgga tctcgatatt gatgtttttg 4680
attcactcgt acctcattca aagtagtatt caatgcttga agtgtagcat ttatttgtgt 4740
gattgcagca gtatgttcgt ctaactgttg ttggactttc ataagtgcat cattattatc 4800
acctttagac atcttcaaaa cctgtaaaaa gtaaacactc aacactcaaa aataaaagtt 4860
agcaaacctc accattaatc actcaaaaag aaaaatcaaa ttctcaatga ggtcgaattc 4920
aatcttgtga gttctttatc agagtttata tcaaccaatt agagagtgtg aaccaaacta 4980
ccaaagaatc ctaatttgca ctaggatgcc aaaaactgac gagacaccaa gtgattcgtg 5040
ttgcaccgag gaaggagttg tgcacacgtg taaatccaac taacacaaga aacaagaagg 5100
tgttagataa cgtaacggaa gaataaaagc aaacaaatga aaacctacag ctaagaatca 5160
ataaaaattg ctgaaaatag aaaacccgaa aaactgcgga gtaacttgac aacttcgttc 5220
gaggtgttcc tgatctcaaa aaatcacgaa attaaatctt tgaatgttct tatatataga 5280
attttttatc tggaaatttt gggcaccaaa ttcaaccccg ctgaatcttt ttttaaattt 5340
ttaattgaat ttcatctttt ttttattttt ttggactttt ttgactaatt tttttggggg 5400
caataatttt tttttatttt caatccccag gggcccaaaa actgtgttgg taaaatattt 5460
tcaaaataaa tcgaaaaaac ttttaacccc cctccaaatg gaattttttt tttaaaaaaa 5520
tttttttttg gggaaaaaac tgtgctggtt ttttggtttt taaaaaaaaa ataaaaaatt 5580
tcgtttttaa aaaaatctaa ccccagaaaa aaccccccaa aaaacccccc aaaaaaattt 5640
taatacccca agggggtata acgggggacg ccccccgcgg gacaccccaa aaataacgca 5700
agttttttcc ccaagaatct ccccccggaa aaaaaaactc cccccttctc taaaaaaaaa 5760
aaaaaatttt tcttataaaa aaaaaaaa 5788

[0357] To determine if this structure correlated with centromeric localization, the investigators prepared these sequences (SEQ ID NOs:95 and 96) as probes for FISH analysis. Cotton mitotic metaphase chromosomal preparations were probed. Chromosomes were visualized by counter-staining with DAPI.

[0358] FIGS. 5B-51 shows the results of these experiments. When metaphase chromosomes are probed with SEQ ID NO:95, specific to the CenCORE, signal is observed on every chromosome and localizes to the centromeric constrictions (FIG. 5B; a magnified view of one of the labeled chromosomes is shown in FIG. 5F). Similar results are observed when the same preparations are probed with SEQ ID NO:96, specific to the CenFR sequences (FIG. 5C; a magnified view, FIG. 5G). When the signal from the two probes, SEQ ID NOs:95 and 96, are overlain, they co-localize (FIG. 5E; a magnified view, FIG. 5I), indicating that the two sequences are centromeric. FIG. 5D shows the same preparation stained with DAPI (magnified view, FIG. 5H).

[0359] The investigators observed that each CenFR was 100% identical (SEQ ID NO:96), indicating that this element inserted recently (SanMiguel, Gaut et al. 1998). The investigators search Gossypium genomic sequence using CenFR (SEQ ID NO:96), identifying a 10,911 nucleotide element was designated CRG2, with high sequence similarity to CRG1 (95% identity of the LTRs). Also, the two LTRs of CRG2 were observed to be only 92% identical. The investigators also queried the publicly avaialbe cotton expression sequence databases to determine if any other sequence aligned with the CenFR and CenCORE region. Interestingly, they observed several expressed sequence tags (ESTs), and an internal region of ATGP5, a gypsy-like LTR retrotransposon. Functional centromere-specific retrotransposon elements have been described in monocots (e.g., maize and rice), but not in dictots. The investigators next analyzed the relationship between CRG and other known retroelements, including centromere retroelements from other species. BLAST searches against the nonredundant nucleotide collection showed that the polyproteins of both CRG1 and CRG2 show the highest sequence similarity to Ty3-gypsy elements.

[0360] The identification of a higher plant centromere that does not comprise an array of tandem repeat sequences is unexpected and thus surprising and novel.

### Example 6

### Genome Specificity of Centromeric DNA

[0361] By probing the BAC library with contig4199 (SEQ ID NO:94) using standard molecular biology techniques, BACs containing centromeric sequences were identified. Fifty-four BACs were chosen for further characterization. The investigators used primers to amplify CenCORE (SEQ ID NO:95) and CRG1 (SEQ ID NO:97), having both a CenCORE (SEQ ID NO:95) and the CenFL (SEQ ID NO:96) sequences, from individual BACs, shown in Table 9. During analysis of the amplified sequences, the investigators observed that instead of the expected approximately 3 kb CenCORE fragment, an about 6 kb fragment was amplified from 3 of the 54 BACs. Using this 6 kb PCR fragment as a probe for FISH analysis as described in Example 2, half of the centromeres showed stronger signal than others, as shown in FIG. 6. FIG. 6A shows the sample counterstained with DAPI. FIG. 6B shows staining with 6 kb CenCORE probes (amplified by the primers of SEQ ID NOs:109 and 110), showing (1) every chromosome being labeled at the centromeric constriction, as expected, and (2) a sub-population of chromosomes showing qualitatively significantly stronger signal than other chromosomes. FIG. 6C shows the same sample probed for the CRG1 (SEQ ID NO:96) sequence, showing a more even distribution of signal. When the images are overlaid (FIG. 6D, showing the merged images of FIGS. 6A-C; and FIG. 6E, showing the merged images of FIGS. 6B and 6C), the signals are observed to overlap, and the difference in staining intensity of a subpopulation of chromosomes is again observed. These results indicate that the 6 kb fragment probe amplified by SEQ ID NOS:109 and 110 binds to a sub-genome specific centromere sequence.

[0362] G. hirsutum is a tetraploid derived from a recent allopolyloidization event, which brought together a New World D genome and an African-Asian A genome approximately a million years ago (Wendel and Cronn 2002). To determine whether the CRG element was present in the centromere regions of the progenitor diploid Gossypium A and D genomes, the investigators used dot blot hybridization and FISH to verify CRG presence and localization in existing A and D diploid species. The investigators found that the CRG element was observed in the three D genome species examined (G. davidsonii D3-3, G. klotzschianum D3-K, G. raimondii D5-2; FIG. 4). Sequences highly similar to the CRG element were also observed after analyzing BLAST searches using the CRG element as a basis for comparison in the G. raimondii D genome genomic survey sequences, confirming the dot blot results. In these species, the CRG element also localizes to the centromere region. However, no hybridization was detected, either by dot blot or by FISH in the A genome species tested (G. herbaceum A1-5, G. arboreum, A2).

[0363] To determine how widespread the occurrence of the CRG1 or CRG2 element is in other Gossypium genomes, the investigators examined other diploid cotton species by the same methods. Although the CRG element was not present in the A genome species tested, the investigators observed it in the centromere regions of two other African-Asian species, the B genome G. anomalum and the E2 genome G. somalense, but not in the E1 genome G. stocksii. The F genome African-Asian species, G. longicalyx, was also negative, as were three Australian species tested, G. nandewarense, Cl, G. puichellum C8-1, and G. nelsonii, G. These results are summarized in Table 10. Thus, the CRG element appears to be present in both New World and Old World lineages of diploid cottons, but absent in Australian and some Old World lineages.

TABLE 9
Primers for amplifying CenCORE (SEQ ID NO: 95)
and CRG1 (SEQ ID NO: 97) sequences

| SEQ | | |
|---|---|---|
| ID NO | Sequence | Target |
| 109 | cacgggaaac tcctacgaaa | SEQ ID NO: 95 Forward |
| 110 | cgagtcacaa aagcccaaat | SEQ ID NO: 95 Reverse |
| 111 | cccccttcct caaaaagatt | SEQ ID NO: 96 Forward |
| 112 | atcagatttt gggcgttttg | SEQ ID NO: 96 Reverse |

TABLE 10
Summary of CRG element analyses in different cotton species

| | | CRG1 | CRG2 | CRG | CRG BAC | Gh1 | pXP | 5S | 18S |
|---|---|---|---|---|---|---|---|---|---|
| Species | | internal | internal | LTR | 53H10 | (194bp) | 1-80 | rDNA | rDNA |
| G. herbaceum | A1-5 | − | − | − | − | − | + | + | + |
| G. arboreum | A2 | − | − | − | − | − | + | + | + |
| G. anomalum | B1 | + | + | + | +/− | − | ++ | + | + |
| G. pulchellum | C8-1 | − | − | − | − | − | + | + | + |
| G. nandewarense | C1 | − | − | − | − | − | + | +/− | + |
| G. davidsonii | D3-3 | + | + | + | + | + | + | + | + |
| G. klotzschianum | D3-K | + | + | + | + | + | + | + | + |
| G. ramondii | D5-2 | +/− | +/− | +/− | +/− | +/− | ++ | +/− | ++ |
| G. hirsutum | AD1 | + | + | + | + | + | + | + | + |
| G. barbadense | AD2 | + | + | + | +/− | + | + | + | + |
| G. mustelinum | AD4 | + | + | + | + | +/− | + | + | + |
| G. hirsutum | AD1 | + | + | + | + | + | ++ | + | ++ |
| TM-1 | | | | | | | | | |
| G. stocksii | E1 | − | − | − | − | − | + | + | + |
| G. somalense | E2 | + | + | +/− | +/− | + | ++ | + | ++ |
| G. longicalyx | F1 | − | − | − | − | − | + | + | + |
| G. nelsonii | G | − | − | − | − | − | + | + | + |

### Example 7

### Additional Exemplary G. hirsutum Centromere Sequences

[0364] To identify additional centromere sequences from G. hirsutum, the investigators used two approaches: a bioinformatics approach, and a BAC library probing approach. In the first approach, BLAST searches were run, using CRG1 (SEQ ID NO:97) [is this correct?] as a basis for comparison. The BLAST parameters were NCBI BLAST default parameters From these studies, 32 additional GenBank accessions were identified having similar structures (CenFR-CenCORE-CenFR); from these, four were chosen for further study and there corresponding CEN sequences are shown in Table 11.

TABLE 11
Exemplary CEN sequences (SEQ ID NOs: 113, 116, 119, and 122)

SEQ ID NO: 113 (from GenBank Ac187405)
gcccatagtg ggggtttaat gggacatttt ggagtggcca aaacactaga tatcttgcaa 60
gaacactttc attggccaca tatgaagaag gatgtggaaa aggtatgttc caagtgcatt 120
acatgcaaac aagcaaaatc taaggtaatg cctcatggcc tttacactcc tctaccgatt 180
cctacttcac cttgggtaga tttatccatg gattttattt taggttttcc tcgaactaag 240
aaaggaagag atagtatatt tgttgttgtt gacaggtttt caaagatgac acattttgtt 300
tcttgtcaca aaacagatga tgctacacat gtggcagact tattctttaa agaggtggta 360
agacttcatg gcatccctaa aacaattgtt tctgatacag atgtcaaatt ccttagccac 420
ttttggaaga tattgtgggg taagcttggt actaaattac tttattctac tacatgtcac 480
ccccaaactg atggtcaaac tgaagtagtt aatcgagtct tagggacttt attacgagct 540
gttgtgggaa aggacattag aaattgggaa gaatgcctac catttgttga atttgcatat 600
aatagatcta ttcattctac aactggttat tctccatttg aacttgttta tggctttaac 660
ccactaacag tacttgatct tgcgccactc cctcttgaac acattataaa tttagatggc 720
gaatagaaag ctgagttggt gaaatcccta catgagaagg ctaggcaacg aatagccaaa 780
acaaatgatg taaacaccaa caaagcaaac aaggg 815
SEQ ID NO: 116 (from GenBank Ac188141)
ttcgacatgg gatgagttga aacagattat gcgtaaaagg tttattccac ctcactacta 60
tagagaaatt aaaacaaagt tgagaagact tatccaaggt agtaggacgg tggatgaata 120
ttttaaagag atggagatgc tcattcagag agctaatgtg gaggaagatg aagaaacaac 180
tatggttcga ttcattgatg gtttgaacag gccgatagct aatacattaa ggctacaaac 240
ttacattgat ttggaagaag cagttcacaa agccattgag atcgagcaac aattaaagga 300
acaaaggttt gggtccttct ctacttcaca atattatcga ggtaacaatt ccaattctga 360
ttttaagagt tcaaaaccac cttttgttac taacaagtct tctttgagta atggaagtaa 420
acaatcagat tggaagaaag gggctcctgc taaaatgcaa acaccttcta agcagcccaa 480
tttaggtgat tcgagtgcga agaggactcg tgagattgaa tgctttaagt gcaaagggcg 540
tggtcattat agtagagaat gccctaacac gagattactt cttctaaaag ataacggtga 600
gtacacgtcc gactctgata atacagatcc agatatgcca gaacttgtgg atgacagtga 660
taatggcgac gagttggtca aaccaccaaa ggaaggggac tttgctaact ttcaatgcct 720
tgtagttcgt cgaaccctta acattcagat gaaagatgat gatagccaaa gggccaatat 780
tttccattct cggtgtttta ttaaaggtaa cttatgttca ctcattattg atagtggtag 840
ttgctcaaat gtggtgagta gctatttggt tgattcttta aagttacctt gcaccaaaca 900
ccctaagcca tatcaccttc agtggcttaa tgaatgttcc gaagttaaag ttacgaaaca 960
gtccttggtc acttttaaac tcggcaatta tgaggatgaa gtatggtgtg atgtagtccc 1020
aatgcatgcg gcacacttgc tccttggacg accttggcaa tttgat 1066
SEQ ID NO: 119 (from GenBank Ac193955)
tggttggtca catcaaggaa gcttggacca actcaaaaag caatccgtgc actttaatac 60
gagctgaatt aacttccatt tcagctcaat gagctcgaat tagctcaact tcagctcaaa 120
ccttttcaat tcagcttaat atcaactaga cattaattta atagctgaat atttatttaa 180
gtcgatttaa ttagtttatt tcagcttatt aatatgtttg ttgcatgttt ttaatatgtc 240
aagttttatt acatgatttt aagttgcttt aaagctgccg aatttaatga gctgatttta 300
gtgatatagt tgaccgaatt aatgtttcat ggttttaata ttaattttgt taagctaaat 360
atcatattaa ttttagttct tcttatttat ataggttggc cgaatgtgtg ggatcattta 420
acaaggttag ccgaatttga agattcattt tagcaaggtg catgcatgtt agatacattg 480
cacctggaga tacatgcatc aaattggtga gctgaattca acattcctag gtgactattc 540
ggccaaggga gctaatgttt ccaactccaa aactgcccat taattccttt cacatttgct 600
ggatgcatct tggcttttcg gttccatgtg ttcacactcc atgactcttc aacgttgagt 660
tttcacactt gaattggctg ctcattatcc tcttaattgc tggtcacctt tcagccaaaa 720
gttacaacat aaatgagcta atttatgccc attggccgaa cctagctatc catgcatcat 780
ctaagttttt ctaagtccaa tgcttcatct agaaggtgtc taatggagct ccatgttcag 840
ccgaatctag ctagttcatt taagtgattc atttgcttaa tttttaagga atgtaagtga 900
ccattcggct agcttaggtg ttgcttataa atagctgaaa ttttactttg taaagaactt 960
ttgacatttt taattagcga attgctgcca aaattgtgag gcattttctc tcaaatttcg 1020
ttcgagaccc gtaagactta tctaagcttt tagtggcatc tttccgagtc ttttccgaac 1080
ttatcactcc ttaaacccga gtgtggcgtt cacctttgat acctttggtt catactttcc 1140
taagtatcgg gtcaaggtcc ttttcaacca tttccaattc atttaggtcc tataagtttc 1200
gggtcgacac ttttctttag tgttggttca ttcttgacct ctttgaacca ttaccaattc 1260
gtaccaaata ccataccatt tcataccaat tccataccat ttcgtaccaa ttcccaaata 1320
ccaaaacgta gcaaaaccaa ataccatttc ttaattatct taaaccgaac tcttccattc 1380
tattcatacc atttcgactt aaaccaaatc cacatccaac tttgcacaaa cttatcttac 1440
ttctttgtac acaaatatat tctaactcct cgtctaatct acttcttcgt ttacgatcgg 1500
gaaccaaacg actcggactc 1520
SEQ ID NO: 122 (from GenBank Ac197186)
gtaaaccgcc atcggaatta tgaaggtgag atttcgacat gggatgagtt gaaacagatt 60
atgtgtaaaa ggtttattcc acctcactat tatagagaaa ttaaaacaaa gctgagaaga 120
cttatccaag gtagtaggac ggtggatgaa tattttaaag agatggagat gctcattcag 180
agagctaaca tggaggagga tgaagaaaca actatggttc gattcattga tggtttgaac 240
aggccgatag ctaatacatt gaggctacaa acttatattg atttggaaga agcagttcac 300
aaagccattg agatcgagca acaattaaag gaacaaaggt ttgggtcatt ctctacttca 360
caatattacc gaggtaacaa ttccaattct gattttaaga gttcaaaacc accttttgtt 420
actaataagt cttctttgag taacaagcag ttagattgga aaaaaggggc tcctgctaaa 480
acgcaaacac cttctaagta gcccaattta ggtgattcga gtgtgaagag gactcgtgag 540
gttgaatgtt ttaagtgcaa agggcgtggt cattatagta gggaatgccc taacacgaga 600
ttccttcttc taaaagataa tggtgagtat acttccgact ctgataaaac agatccagat 660
atgccagaac ttgttgatga cagtgataat ggcgaagagt tggttgaacc actcagagaa 720
ggagactttg ctaattttca atgccttgta gttcgtcgaa cccttaacat tcagatgaaa 780
gatgatgata gccaaagggc caatattttc cattctcggt gttttattaa aggtaactta 840
ttgatgtgat ccggctcggt tgattgagtc gattcacttg attgcccgat cgtcgacgag 900
aagtttgttc gattttgtag atagatggag ttagatgatt tttttatagc ggaagctgag 960
aaaatgggtt caaaagatgg tttggataga tgtttgatag gttcggtgaa ataaggaaat 1020
attgtttata atttaatagt taaaatggaa tggaaaaata gaactcaagc gaagaacgat 1080
tcaatactat atgaagtatt gccccgggac ttatattgct caaggtggat tatatggatt 1140
gtcgaagatg gaccttgacc cgttacctat agagaggtag gaatcaaagg tttaaaaagg 1200
tggatgaacg ccacaccagg atggtgataa gttcaagaag tcgggttgac gccactagcg 1260
agctagataa gtcagacgag actcaaacga aatcaggttg gaggtaacct cacaataagt 1320
ttaataatca gaaatgtctg taacctttta caataaacaa gtaagctatt tataagccta 1380
aaatgcctat tgatattcgg catctatgtt gttcacatta acttaaatcc tgttcacata 1440
ggtatttaac atgttcacac aaaaagcatt aaaattcggt tcatgcttga aaatggtaca 1500
tgaattggcc gaaccatcat gatgcttcac ttgatgcatt catgcatcct tagccttgaa 1560
ggatctccat aattccgtga atgtgcagcc ctttaatgat cctacatctc ccctggctga 1620
atgaggcatt aatctgccta aaatacttga atggtcatct tgaaaatgca tgaatcatgc 1680
atgaaacgtc ccatgtgttt tcccccataa atatgatcca tgaatcttca aatacatgaa 1740
ctttcagcaa ctccctcttg catgaacgtc ccaaatgcat gtgctccttt aaatgccatc 1800
cattgaacct caattgtgca tgcacactcc catacattgc accaatccat tcatgaacct 1860
gaagacaaat taaatggttt atttcagtaa aataaatgca agctaaagaa agctaaaaat 1920
aagctcattg ggttgaggtt gagctgaatt caactcgaat gtgctgactc gagctcgagt 1980
gagctggaaa cgagctaaat ggagctcaat gagaaggaat tgaactaatt cagctcgcat 2040
gggtttgcaa gcaatggtta gggagctggt caaaaagtgt gcccgaggcg tggtcgtatc 2100
acttatgttc actcattatt gatagtggta gttgctcaaa tgtggtgagt agctatttgg 2160
ttgattcttt aaagttacct tgcaccaaac accctaagcc atatcacctt cagtggctta 2220
atgaatgttc cgaagttaaa gttacgaaac agtccttggt cacttttaaa ctcgataatt 2280
atgaagatga agtatggtgt gacgtagtcc caatgcatgc ggcacatttg ctccttggac 2340
gaccttggca atttgatcgc gatgttacac accaaggtaa acttaatcga tactcccttg 2400
tatttaaagg taagaaattc acttttgctc ctttaaatcc tactgatgta tataaagatc 2460
aattgaggat gataaaattt tgtgaggggg taagggagaa agagcaagta caaaagacag 2520
agagaaaaga ggctaatagt agtggaaaaa gtcaaaattt aaaaagccca aaggtgagtg 2580
aatcctctag tggtaaaatg agcgaaaaaa atcttttggc aacaaaaaaa gatgtgaaga 2640
gagccctact taataaacag ccttgtatcc ttgtgaggtt taggcaaaat tatttatctt 2700
tatctaacat taacgaaaat tttcctagtg tgtttcaatc tcttttgcag gattatgagg 2760
atgtttttag tgaggcccct aaaggtttac cacctttacg agggatagaa catcaaattg 2820
acttaatacc cggagcttca atcccaaata gaccagccta tagatgcaat cctgaggaga 2880
caaaggaatt gcaaaggcaa gttgaggact tactagacaa agggtacatt cgtgagagcc 2940
taagtctttg cgctgttcct gtcttattgg tgccaaagaa agatggtacg ttttgtatgt 3000
gtgttgattg tcgcccaatc aacaagataa cggtaaagta tcgacaccca atccctagac 3060
ttgatgatat gcttgatgaa ttacatggtt caataatatt tacaaaaatt gatttaaaaa 3120
gcggttatca tcaaatttga atgagggaag gggatgaatg gaaaacagct tttaaaacaa 3180
aatttggatt gtatgaatgg ttagttatgc ctttcggcct 3220

[0365] To confirm that these sequences localize to cotton centromeres, PCR primers were generated for each of the CEN sequences shown in Table 10 (SEQ ID NOs:113, 116, 119, and 122), the PCR-amplified polynucleotides labeled with fluorescent dyes (such as ALEXA FLUOR® 488 (green) or ALEXA FLUOR® 568 (red)), and used in FISH to probe cotton root cells to ascertain the genomic localization of the probes. The PCR primers are shown in Table 12.

TABLE 12
Primers for amplifying exemplary CEN sequences
of SEQ ID NOs: 113, 116, 119, and 122

| SEQ | | |
|---|---|---|
| ID | | |
| NO | Sequence | Target |
| 114 | gcccatagtg ggggtttaat | SEQ ID NO: 113 Forward |
| 115 | cccttgtttg ctttgttggt | SEQ ID NO: 113 Reverse |
| 117 | ttcgacatgg gatgagttga | SEQ ID NO: 116 Forward |
| 118 | atcaaattgc caaggtcgtc | SEQ ID NO: 116 Reverse |
| 120 | tggttggtca catcaaggaa | SEQ ID NO: 119 Forward |
| 121 | gagtccgagt cgtttggttc | SEQ ID NO: 119 Reverse |
| 123 | gtaaaccgcc atcggaatta | SEQ ID NO: 122 Forward |
| | tgaa | |
| 124 | aggccgaaag gcataactaa | SEQ ID NO: 122 Reverse |
| | ccat | |

In a second approach, the investigators used PCR product of SEQ ID NO:97 to probe the BAC library described in Example 3. The investigators identified 46 BAC clones for further study, including characterizing these BACs for their genomic localization by FISH and BAC-end sequencing. Of these 46 BACs, 21 showed good centromere localization, localizing to centromeric constrictions in every chromosome in FISH preparations. FIG. 7 demonstrates this localization. In FIG. 7, the chosen BAC (“53H10”) was labeled with ALEXA FLUOR® 488 (green); the metaphase chromosomes were counter-stained with DAPI, and SEQ ID NO:96 was used as a probe dentify the centromeric constriction and was labeled with ALEXA FLUOR® 568 (red). As shown in FIG. 7A, all of the chromosomes counterstained with DAPI. FIG. 7B shows that BAC 53H10 appears to have labeled every chromosome in the preparation at centromeric constrictions. Confirming this observation that the BAC labeled centromeric constrictions, FIG. 7C shows the same preparation probed with SEQ ID NO:96, which stains centromeric constrictions, which gave an identical staining pattern as BAC 53H10. When the images are overlaid, there was no difference in staining, confirming that BAC 53H10 and SEQ ID NO:96 co-localize to centromeric constrictions (FIG. 7D).

### Example 8

### Assembly and Components of Cotton MCs (Prophetic)

[0366] Two methods have been developed to construct plant MCs. The first method relies on cre/lox recombination in that a BAC vector containing plant centromeric DNA and a loxP recombination site is recombined, by the action of cre re-combinase, with a donor vector carrying plant gene expression cassettes to generate a plant MC. The second method uses restriction enzyme digestion and ligation to produce (1) a vector fragment containing plant gene expression cassettes and (2) a centromere fragment with compatible cohesive ends. The two fragments are ligated into a circular structure to form a plant MC.

[0367] The components of the cotton MCs include a donor vector with a fluorescent (or other) reporter gene(s), a selectable maker gene, a cloning vector containing a cotton centromere sequence (selected from the group, for example, of SEQ ID NOs:90-92, 94-97), and can also contain telomere sequence. These components are described in detail below.

[0368] MC Construction by Cre-Lox Recombination

[0369] Cre recombinase-mediated exchange is used to construct MCs by combining the plant centromere fragments cloned in pBeIoBACI1 with a donor plasmid (e.g., pCH R487, Table 10). The recipient BAC vector carrying the plant centromere fragment contains a loxP recombination site; the donor plasmid contains two such sites, flanking the sequences to be inserted into the recipient BAC. MCs are constructed using a two-step method. First, the donor plasmid is linearized to allow free contact between the two loxP sites; in this step the backbone of the donor plasmid is eliminated. In the second step, the donor molecules are combined with centromere BACs and are treated with Cre recombinase, generating circular MCs with all the components of the donor and recipient DNA. MCs are delivered into E. coli and selected on medium containing antibiotics corresponding to the antibiotic resistance genes present on the vector molecule (e.g., kanamycin and chloramphenicol). Only vectors that successfully cre recombined and contained both selectable markers survive in the medium. MCs are then extracted from bacteria and restriction digested to verify DNA composition and calculate centromere insert size.

[0370] MC Construction by Restriction-Ligation

[0371] MCs are also constructed using standard cloning procedures. For example, a BAC containing a centromere fragment is digested with a restriction endonuclease that creates sticky ends, such as NotI. The digested DNA is then electrophoresed to purify the centromere fragment into a single band. The electrophoresis is carried out with conventional agarose gel electrophoresis with a linear electric field, or CHEF gel electrophoresis using an electric field that switches its orientation in the course of the run. When the electrophoresis is complete, the centromere fragment is visualized by ethidium bromide staining and illumination under ultraviolet light. The band corresponding to centromere DNA is then excised, and the DNA purified from the gel using conventional method for gel-purifying DNA fragments from agarose gels. The purified fragment is then ligated with a vector fragment that contains a low-copy E. coli backbone (e.g., the F′ plasmid replicon) and one or more plant-expressed genes. The vector fragment is digested with a restriction endonuclease leaving compatible sticky ends to those present on the centromere fragment. Alternatively, both fragments can be blunt.

[0372] To achieve a high rate of insertion of the centromere fragment into the vector, the phosphate groups are removed from the ends of the vector molecule by treating this DNA molecule with phosphatase; this step prevents ligation of the vector molecule to itself or to other vector molecules. After ligating vector DNA and centromere fragment, the MCs are delivered into E. coli and selected on medium containing antibiotics corresponding to the antibiotic-resistance genes present on the vector molecule (e.g., kanamycin and chloramphenicol). MCs are extracted from bacteria and restriction digested to verify DNA composition and calculate centromere insert size.

[0373] Cloning Vector

[0374] The vector, pBeIoBAC11 is an E. coli plasmid cloning vector based on the F′ plasmid replicon of E. coli. The vector contains a chloramphenicol resistance gene for selection of the plasmid in bacteria, repE, sopA/B/and C for maintenance of the plasmid in bacteria, and a LoxP recombination site for specific cleavage by Cre recombinase. A description of ail the genes contained within the vector and the location of the gene within the vector are set out in Table 13.

TABLE 13
pBeloBAC11 components

| Element | Size (bp) | Location (bp) | Details |
|---|---|---|---|
| Bacterial chloramplienicol | 660 | 766-1425 | Bacterial selectable marker |
| resistance | | (complementary) | |
| ori2 | 67 | 2370-2436 | F′ plasmid origin of replication from |
| | | | E. coli |
| repE | 755 | 2765-3520 | mediation of replication complex at Ori2 |
| | | | (Mori, Kondo et al. 1986) |
| SopA | 1166 | 410S-5274 | Partition of plasmid to bacterial |
| | | | daughter cells (Mori, Kondo et al. 1986) |
| SopB | 971 | 5274-6245 | Partition of plasmid to bacterial |
| | | | daughter cells (Mori, Kondo et al. 1986) |
| SopC | 474 | 6318-6791 | Partition of plasmid to bacterial |
| | | | daughter cells (Mori, Kondo et al. 1986) |
| cos | 400 | 7050-7449 | Lambda DNA recognition sequence for |
| | | | phage packaging |
| LoxP | 34 | 7467-7500 | Recombination site for Cre-mediated |
| | | | recombination (Abremski, Hoess et al. |
| | | | 1983) |

[0375] Source of Coding Regions Used in Plant-Expressed Genes

[0376] The fluorescent reporter genes DsRed and AMCyan were isolated from Athozoa species; and ZsYellow and ZsGrecn were isolated from Zoanthus sp (Matz, Fradkov et al. 1999). These reporter genes express proteins that are similar to Green Fluorescent Protein (GFP), that is a commonly used reporter gene in various biological systems, including plants. All fluorescent reporter genes can be commercially obtained. The selectable marker gene NPTII was isolated from E. coli (Bevan, Flavell et al. 1983).

[0377] Donor Vectors Used to Construct MCs Via Cre/Lox Recombinations pCHR487

[0378] The plasmid pCHR487 was developed using the commercially available high copy number E. coli cloning vector pUC19 (Yanisch-Perron, Vieira et al. 1985). The plasmid backbone was modified with the bacterial kanamycin selectable marker for maintenance of the plasmid in bacterial hosts, a pair of complementary loxP sites and a polylinker that facilitated the modular assembly of several plant-expressed genes for expression in plant MCs. Using standard cloning methods, plant-expressed gene cassettes were introduced into the modified pUC19 vector to construct pCHR487. This vector includes DsRed with a nuclear localization signal (Clontech), that was regulated by the Arabidopsis UBQ10 promoter (At4g05320) and the Arabidopsis pyruvate kinase terminator (At5g52920). The vector also includes the yeast TEF2 promoter from Saccharomyces cerevisiae and the plant kanamycin selectable marker Npt1 from E. coli. To enhance the stability of the Npt1 transcript, the Arabidopsis thaliana UBQ10 intron was inserted 5′ of the yeast TEF2 promoter and 3′ of the Npt1 gene. The UBQ10 intron is a naturally occurring component of the transcribed sequences from the Arabidopsis thaliana UBQ10 gene. The vector also contains a high-copy E. coli replication origin and an ampicillin bacterial selectable marker. MC genetic elements within the pCHR487 vector are set out in Table 14.

[0379] Prior to using pCHR4S7 to construct plant MCs, pCHR487 is digested with restriction endonucleases to linearize the plasmid and remove the high copy origin of replication and the bacterial ampicillin selectable marker, leaving loxP recombination sites on each end of the linear fragment. The resulting linearized vector is cre recombined in vitro to generate circular donor pCHR487 plasmids lacking a bacterial origin of replication and the ampicillin selectable marker. The donor pCHR487 construct is used to construct plant MCs.

TABLE 14
Donor Components of pCHR487

| Element | Size (bp) | Location (bp) | Details |
|---|---|---|---|
| UBQ10 promoter | 2038 | 361-2398 | Arabidopsis thaliana polyubiquitin |
| | | | promoter (At4g05320) |
| DsRed2 + NLS | 780 | 2435-3214 | Nuclear localized red fluorescent protein |
| | | | from Discosoma sp. (Matz, Fradkov et al. |
| | | | 1999) |
| Pyruvatc kinase | 332 | 3349-3680 | Arabidopsis thaliana pyruvate kinase |
| terminator | | | terminator (At5g52920) |
| Bacterial kanamycin | 817 | 3825-1641 | Bacterial kanamycin selectable marker |
| Act2 terminator | 800 | 4823-5622 | Arabidopsis thaliana Actin 2 terminator |
| NptII | 795 | 5685-6479 | Neomycin phosphotransferase II plant |
| | | | selectable marker |
| UBQ10 intron | 359 | 6507-6865 | PCR amplified Arabidopsis thaliana intron |
| | | | fromUBQ10 gene (At4g05320) for |
| | | | stabilization of NptII gene transcript and |
| | | | increase protein expression levels |
| TEF2 Promoter | 2000 | 6880-8879 | Saccharomyces cerevisiae translation |
| | | | elongation factor alpha promoter for |
| | | | expression of NptII |
| LoxP | 34 | 312-345 | Recombination site for Cre mediated |
| | | &8898-8931 | recombination (Abremski, Hoess et al. |
| | | | 1983) |

[0380] Cre recombinase-mediated exchange is used to construct MCs by combining the plant centromere fragments of pBeIoBACl 1 with the donor vector pCHR487. The recipient BAC vector carrying the plant centromere fragment contains a loxP recombination site that facilitates the introduction of donor DNA via the action of cre recombinase. Using purified cre recombinase in vitro, BAC centromere recipients are combined with donor pCHR487DNA, generating circular MCs with all the components of the donor and recipient DNA. MCs are delivered into E. coli and selected on medium containing kanamycin and chloramphenicol. Only vectors that successfully cre recombine contain both selectable markers and are easily selected from non-recombined events. MCs are then extracted from bacteria and restriction digested to verify DNA composition and calculate centromere insert size.

[0381] The pCHR488 donor vector also can also be used to construct MCs. In the pCHR488 MC donor vector, the yeast TEF2 promoter of pCHR487 is replaced with the yeast GPD1 promoter that drives the plant selectable marker NptII. The yeast GPD1 promoter was PCR amplified from Saccharomyces cerevisiae genomic DNA using standard PCR methods. Standard cloning methods were used to replace the TEF2 promoter and to insert the yeast GPD1 promoter. For construction of MCs, donor pCHR488 was generated as described for pCHR487. As with pCHR487, the circular donor pCHR488 lacks a bacterial origin of replication and the bacterial ampicillin selectable marker. The donor pCHR488 construct was used to construct plant MCs as described for pCHR487. MC genetic elements within the pCH R488 vector are set out in Table 15.

TABLE 15
Donor Components of pCHR488

| Element | Size (bp) | Location (bp) | Details |
|---|---|---|---|
| UBQ10 promoter | 2038 | 361-2398 | Arabidopsis thaliana polyubiquitin |
| | | | promoter (At4g05320) |
| DsRed2 + NLS | 780 | 2435-3214 | Nuclear localized red fluorescent protein |
| | | | from Discosoma sp. (Matz, Fradkov et al. |
| | | | 1999) |
| Pyruvate kinase | 332 | 3349-3680 | Arabidopsis thaliana pyruvate kinase |
| terminator | | | terminator (At5g52920) |
| Bacterial kanamycin | 817 | 3825-4641 | Bacterial kanamycin selectable marker |
| Act2 terminator | 800 | 4823-5622 | Arabidopsis thaliam Actin 2 terminator |
| NptII | 795 | 5685-6479 | Neomycin phosphotransterase II plant |
| | | | selectable marker |
| UBQ10 intron | 359 | 6500-6859 | PCR-amplified Arabidopsis thaliana intron |
| | | | from UBQ10 gene (At4g05320) for |
| | | | stabilization of NptII gene transcript and |
| | | | increase protein expression levels |
| GPD1 promoter | 2000 | 6880-8879 | Saccharomyces cerevisiae glycerol-3- |
| | | | phosphate dehydrogenase (NAD+) promoter |
| | | | for expression of NptII |
| LoxP | 34 | 312-345 & | Recombination site for Cre mediated |
| | | 8898-8931 | recombination (Abremski, Hoess et al. |
| | | | 1983) |

[0382] The pCHR489 donor vector aiso can also be used to construct MCs. In the pCHR489 MC donor vector, the yeast TEF2 promoter of pCHR487 is replaced with the Drosophila melanogaster Grim fly promoter for driving the plant selectable marker NptII. The Grim fly promoter was PCR amplified from Drosophila melanogaster genomic DNA using standard PCR methods. Standard cloning methods were used to replace the TEF2 promoter in pCHR487 with the Grim fly promoter to generate pCHR489. For construction of MCs, donor pCHR489 was generated as described for pCHR487. As with pCHR487, the circular donor pCHR489 lacks a bacterial origin of replication and the bacterial ampicillin selectable marker. The donor pCHR489 construct was used to construct plant MCs as described for pCHR4S7. MC genetic elements within the pCHR489 vector are set out in Table 16.

TABLE 16
Donor Components of pCHR489

| Genetic Element | Size (bp) | Location (bp) | Details |
|---|---|---|---|
| UBQ10 | 2038 | 361-2398 | Arabidopsis thaliana polyubiquitin |
| | | | promoter (At4g05320) |
| DsRed2 + NLS | 780 | 2435-3214 | Nuclear localized red fluorescent protein |
| | | | from Discosoma sp. (Matz, Fradkov et al. |
| | | | 1999) |
| Pyruvate kinase | 332 | 3349-3680 | Arabidopsis thaliana pyruvate kinase |
| terminator | | | terminator (At5g52920) |
| Bacterial kanamycin | 817 | 3825-4641 | Bacterial kanamycin selectable marker |
| Act2 terminator | 800 | 4823-5622 | Arabidopsis thaliana Actin 2 terminator |
| NptII | 795 | 5685-6479 | Neomycin phosphotransferase II plant |
| | | | selectable marker |
| UBQ10 intron | 359 | 6507-6865 | PCR-amplified Arabidopsis thaliana intron |
| | | | from UBQ10 gene (At4g05320) for |
| | | | stabilization of NptII gene transcript and |
| | | | increase protein expression levels |
| Grim Fly Promoter | 2191 | 6880-8879 | PCR-amplified promoter of grim (AKA |
| | | | BcDNA: RE28551) from Drosophila |
| | | | melanogaster |
| LoxP | 34 | 312-345 & | Recombination site for Cre mediated |
| | | 9081-9114 | recombination (Abremski, Hoess et al. |
| | | | 1983) |

[0383] Vectors Used to Construct MCs Via Standard Cloning Methods: pCHR510

[0384] As in pCHR487, pCHR510 contains DsRed with a nuclear localization signal and is regulated by the Arabidopsis UBQ10 promoter. The Arabidopsis pyruvate kinase terminator (At5g52920) was replaced by standard cloning procedures with the Arabidopsis thaliana triose phosphate isomerase terminator to prevent redundant use of the Arabidopsis pyruvate kinase terminator (At5g52920) in pCHR510. As in pCHR489, pCHR510 contains the plant selectable marker NptII regulated by the Drosophila melanogaster Grim fly promoter plus Arabidopsis UBQ10intron and the Arabidopsis Act2 terminator replaced with the Arabidopsis pyruvate kinase terminator (At5g52920). The vector also included a ZsGreen fluorescent gene (Clontech; Mountain View, Calif.) regulated by the Arabidopsis Act2 promoter plus naturally occurring intron and the Arabidopsis Act2 terminator. The high-copy E. coli backbone of pUC19 and the ampicillin bacterial selectable marker were replaced with the low copy pBeIoBAC11 backbone with the bacterial streptomycin resistance gene replacing the chloramphenicol resistance gene. An Arabidopsis thaliana ST11 sub-teloMCric fragment was introduced upstream of the Grim fly promoter to isolate the Grim fly promoter from possible promoter silencing when a centromere fragment was ligated into the donor vector. MC genetic elements within the pCHR510 vector are set out in Table 17 below.

TABLE 17
pCHR510 DNA donor components

| Element | Size (bp) | Location (bp) | Details |
|---|---|---|---|
| Bacterial | 10111 | 16912-17922 | Bacterial selectable marker |
| streptomycin | | | |
| resistance | | | |
| ori2 | 67 | 19158-19224 | F′ plasmid origin of replication from |
| | | | E. coli |
| repE | 755 | 19553-20308 | Mediation of replication complex at |
| | | | Ori2 (Mori, Kondo et al. 1986) |
| SopA | 1166 | 20896-22062 | Partition of plasmid to bacterial |
| | | | daughter cells (Mori, Kondo et al. |
| | | | 1986) |
| SopB | 971 | 22062-23033 | Partition of plasmid to bacterial |
| | | | daughter cells (Mori, Kondo et al. |
| | | | 1986) |
| SopC | 517 | 23106-23623 | Partition of plasmid to bacterial |
| | | | daughter cells (Mori, Kondo et al. |
| | | | 1986) |
| LoxP | 34 | 26-59 & | Recombination site for |
| | | 16212-16245 | Cre-mediated recombination |
| | | | (Abremski, Hoess et al. 1983) |
| ST11 subtelomeric | 4682 | 69-4750 | Arabidopsis thaliana subtelomeric |
| DNA | | (complementary) | DNA from chromosome 5 |
| Grim Promoter | 2187 | 4766-6956 | PCR-amplified Drosophila |
| | | | melanogasler Grim gene promoter |
| | | | for expression of NptII gene in |
| | | | plants |
| UBQ10 intron | 359 | 6963-7322 | PCR-amplified Arabidopsis thaliana |
| | | | intron from UBQ10 gene |
| | | | (At4g05320) for stabilization of |
| | | | NptII gene transcript and increase |
| | | | protein expression levels |
| NptII | 795 | 7350-8144 | Neomycin phosphorransferase II |
| | | | plant selectable marker |
| Pyruvate kinase | 332 | 8212-8543 | Arabidopsis thaliana pyruvate |
| terminator | | | kinase terminator (At5g52920) |
| Bacterial | 817 | 8731-9547 | Bacterial kanamycin selectable |
| kanamycin | | | marker |
| Act2 promoter + | 1482 | 9690-11171 | The Arabidopsis thaliana promoter |
| intron | | | Actin 2 plus natural intron |
| Zs Green | 695 | 11195-11890 | (Matz, Fradkov et al. 1999) |
| Act2 terminator | 800 | 11931-12730 | Arabidopsis thaliana Actin2 gene |
| | | | terminator |
| Triose phosphate | 450 | 12759-13208 | Arabidopsis thaliana triose |
| isomerase | | (complementary) | phosphate isomerase gene |
| | | | terminator |
| DsRed2 + NLS | 780 | 13343-14122 | Nuclear localized red fluorescent |
| | | (complementary) | protein from Discosoma sp. (Matz, |
| | | | Fradkov et al. 1999) |
| UBQ10 promoter | 2038 | 14159-16196 | Arabidopsis thaliana polyubiquitin |
| | | (complementary) | promoter (At4g05320) |

[0385] To construct MCs using pCHR510, the vector is linearized using standard restriction digestion procedures. The cotton centromere from selected cotton BACs, or comprising SEQ ID NOs:90-92, or SEQ ID NO:94, or SEQ ID NO:95, or SEQ ID NO:96, or SEQ ID NO:97 or previously selected cotton MCs is then restriction digested using NotI and ligated into pCHR510 using standard cloning procedures to generate MCs. MCs are delivered into E. coli and grown in selective medium. MCs are then extracted from bacteria and restriction digested to verify DNA composition and centromere insert size.

[0386] pCHR579

[0387] The pCHR579 MC donor vector was constructed using the same method to construct pCHR510, but without replacing the bacterial chloramphenicol gene in the low copy pBeIoBAC11 backbone. The pCHR579 vector is used to generate linear MCs by introducing plant telomere sequences into the MC. Using standard cloning methods the bacterial kanamycin gene was replaced with a bacterial kanamycin selectable marker surrounded by two plant telomere sequences and two unique I-Ppol homing endonuclease sequences.

[0388] Naturally occurring plant telomeres are composed of a seven-nucleotide repeat (taaaccc; SEQ ID NO:98). Plant telomeres were polymerized using standard PCR methods to generate approximately 800 base pair telomerc arrays. The telomere sequences were ligated using standard methods on both sides of the bacterial kanamycin gene. Two unique I-Ppol homing endonuclease restriction sites were introduced between each telomere and the kanamycin gene for linearization of the final MC construct.

[0389] MCs using pCHR579 are constructed as described for pCHR510 using cotton BAC or previously constructed MC centromeric DNA. MCs constructed from pCHR579 are linearized using restriction digested in vitro with homing endonuclease enzyme I-Ppol following standard restriction digest procedures. Linearization of the MC results in the removal of the bacterial kanamycin gene cassette leaving plant telomeres flanking both ends of the linear MC. Linear MCs are then ethanol-precipitated and used for plant transformation. MC genetic elements within the pCHR579 vector are set out in Table 18.

TABLE 18
pCHR579 DNA donor components

| Element | Size (bp) | Location (bp) | Details |
|---|---|---|---|
| Bacterial | 10111 | 16912-17922 | Bacterial selectable marker |
| streptomycin | | | |
| resistance | | | |
| ori2 | 67 | 19158-19224 | F′ plasmid origin of replication from |
| | | | E. coli |
| repE | 755 | 19553-20308 | Mediation of replication complex at |
| | | | Ori2 (Mori, Kondo et al. 1986) |
| SopA | 1166 | 20896-22062 | Partition of plasmid to bacterial |
| | | | daughter cells (Mori, Kondo et al. |
| | | | 1986) |
| SopB | 971 | 22062-23033 | Partition of plasmid to bacterial |
| | | | daughter cells (Mori, Kondo et al. |
| | | | 1986) |
| SopC | 517 | 23106-23623 | Partition of plasmid to bacterial |
| | | | daughter cells (Mori, Kondo et al. |
| | | | 1986) |
| LoxP | 34 | 26-59 & | Recombination site for |
| | | 16212-16245 | Cre-mediated recombination |
| | | | (Abremski, Hoess et al. 1983) |
| ST11 subtelomeric | 4682 | 69-4750 | Arabidopsis thaliana subtelomeric |
| DNA | | (complementary) | DNA from chromosome 5 |
| Grim Promoter | 2187 | 4766-6956 | PCR-amplified Drosophila |
| | | | melanogasler Grim gene promoter |
| | | | for expression of NptII gene in |
| | | | plants |
| UBQ10 intron | 359 | 6963-7322 | PCR-amplified Arabidopsis thaliana |
| | | | intron from UBQ10 gene |
| | | | (At4g05320) for stabilization of |
| | | | NptII gene transcript and increase |
| | | | protein expression levels |
| NptII | 795 | 7350-8144 | Neomycin phosphorransferase II |
| | | | plant selectable marker |
| Pyruvate kinase | 332 | 8212-8543 | Arabidopsis thaliana pyruvate |
| terminator | | | kinase terminator (At5g52920) |
| Plant telomere | 759 | 8598-9356 | based on plant consensus telomere |
| | | | sequence |
| Bacterial | 817 | 9532-10348 | Bacterial kanamycin selectable |
| kanamycin | | | marker |
| Plant telomere | 759 | 10482-11241 | Plant telomere PCR based on plant |
| | | | consensus telomere sequence |
| Acl2 promoter + | 1482 | 11287-12768 | Arabidopsis thaliana promoter Actin |
| intron | | | 2 plus natural intron |
| Zs Green | 695 | 12792-13487 | (Matz, Fradkov et al. 1999) |
| Act2 terminator | 800 | 13528-14327 | Arabidopsis thaliana Actin2 gene |
| | | | terminator. |
| Triose phosphate | 450 | 14356-14805 | Arabidopsis thaliana triose |
| isomerase | | (complementary) | phosphate isomerase gene |
| | | | terminator |
| DsRed2 + NLS | 780 | 14940-15719 | Nuclear localized red fluorescent |
| | | (complementary) | protein from Discosoma sp. |
| | | | (Matz, Fradkov et al. 1999) |
| UBQ10 promoter | 2038 | 15756-17793 | Arabidopsis thaliana |
| | | (complementary) | polyubiquitin promoter |
| | | | (At4g05320) |

[0390] Biolistic Particle Delivery of MCs

[0391] A biolistic delivery method using wet gold particles is used to transform cotton or other host plant cells. The method is adopted from the teachings of Mialhe and Miller (Mialhe and Miller 1994). To prepare the wet gold particles for bombardment, 1.0 μm gold particles is used and washed by mixing with 100% ethanol on a vortex followed by spinning the particles in a microfuge at 4000 rpm in order to remove supernatant. Subsequently, the gold particles are washed with sterile distilled water three times, followed by spinning in a microfuge to remove supernatant. The washed gold particles are resuspended in sterile distilled water at a final concentration of about 90 mg/ml and stored at 4° C. For bombardment, the gold particle suspension (90 mg/ml) is mixed rapidly with about 1 μg/μl DNA solution (in dH₂O or TE), 2.5M CaCl₂, and 1M spermidine.

[0392] To prepare explant tissues for DNA delivery: three days prior to bombardment, an internode of the cotton plant is cut. The internode explant is cut longitudinally with a scalpel to cut a thin slice (⅙-¼ of the intcrnode) off one side of the explant. The prepared inlernodes are placed wound side down on Petri dishes with regeneration media. The Petri dishes are wrapped with tape and placed wound side up under light. The explants are grown for 3 days prior to bombardment.

[0393] For bombardment of cotton suspension cells, a method as follows can be used. Cells are harvested by centrifugation (1200 rpm for 2 minutes) on the day of bombardment. The cells are plated onto 50 mm circular polyester screen cloth disks placed on petri plates with solid medium. The solid medium used is the same medium that the cells are grown in and can contain MS salts, Gamborg's vitamins, sucrose, 2,4D (2,4-dichlorophenoxyacetic acid), MES pH 5.8+(solid medium only), plus 0.26% gelrite, or 0.6% tissue culture agar, added before autoclaving. Approximately 1.5 ml packed cells are placed on each filter disk, and dispersed uniformly into a very even spot approximately 1 inch in diameter.

[0394] Bombardment of the cells is carried out in the Bio-Rad PDS-1000/He Biolistic Particle Delivery System (Bio-Rad). The DNA/gold suspension is resuspended and immediately inserted onto the grid of the filter holder. A 50 mm circular polyester screen cloth disk containing the cells is laced into a fresh 60 mm petri dish and the cells are covered with a 10×10 cm square of sterile nylon or Dacron chiffon netting. The metal cylinder is inserted into the petri dish and used to push the netting down to the bottom of the dish. This weight prevents the cells from being dislodged from the plate during bombardment. The petri dish containing the cells is then placed onto the sample holder, and positioned in the sample chamber of the gene gun and bombarded with the DNA/gold suspension. After the bombardment, the cells are scraped off the filter circle in the petri dish containing solid medium with a sterile spatula and transferred to fresh medium in a 125 ml glass bottle. The bottles are transferred onto a shaker and grown while shaking at 150 rpm.

[0395] A biolistic delivery method using dry gold particles can also be carried out to deliver MCs to cotton cells. A method as follows can be used. 1.0 or 0.6 μm gold particles are washed in 70% ethanol with vigorous shaking on a vortex for 3 to 5 minutes, followed by soaking in 70% ethanol for 15 minutes. The gold particles are then spun in a microfuge to remove the supernatant and washed three times in sterile distilled water. The gold particles are suspended in 50% glycerol at a concentration of 60 mg/ml and stored at 4° C. For bombardment, the dry gold particles are resuspended using a vortex for 5 minutes to disrupt agglomerated particles. Subsequently, the dry gold particles are mixed rapidly with DNA, 2.5M CaCl₂ and 0.2M spermidine in a siliconized, sterile microfuge tube. The samples are allowed to settle for 1 minute and then are spun in a microfuge for 10 seconds to remove the supernatant. Subsequently, the DNA/gold particles are washed once with 70% ethanol, followed by two washed in 100% ethanol. A portion of the DNA/gold mixture is evenly placed on a macrocarrier. The macrocarrier is then placed in the Bio-Rad PDS-1000/He Biolistic Particle Delivery System, and the bombardment is done at rupture disk pressures ranging from 450 psi to 2,200 psi.

### Example 8

### Selection of Cotton Cell Clones Stably Containing MC DNA (Prophetic)

[0396] Use of Visible Marker Genes

[0397] The presence of visible marker genes allows for visual selection of cotton cells stably containing MC DNA because any adchromosomal cells or cell clusters are readily identified by virtue of fluorescent protein expression.

[0398] Transient assays are used to test MCs for their ability to become established in cells following DNA delivery, and for their ability to be inherited in mitotic cell divisions. Expression of a visible marker encoded by a gene present on the MC, such as a fluorescent protein gene, can be used to detect MC presence in the cell, and to follow mitotic inheritance of the MC. In this assay, MCs are delivered to cotton cells of a population that is undergoing cell division.

[0399] After DNA delivery, the cell population is monitored for fluorescent protein expression over the course of one to several weeks. MCs containing active centromeres are observed through the formation of fluorescent cell clusters that are derived from a single progenitor cell that divided and passed the MCs to its daughter cells. Accordingly, single fluorescent cells and clusters of fluorescent cells of various sizes are scored in the growing cell population after DNA delivery.

[0400] Manipulation of Adchromosomal Tissue to Homogeneity

[0401] After identifying clusters of fluorescent cells in bombarded suspension ceil cultures, physical manipulations are carried out to allow for the preferential expansion of cells harboring the delivered genes. Non-fluorescent tissue surrounding the fluorescent clusters is trimmed to avoid overgrowth of fluorescent cells by non-fluorescent ones, while retaining a minimum tissue size capable of rapid growth. These manipulations are performed under sterile conditions with the use of a fluorescence stereomicroscope allowing for visualization of the fluorescent cells and cell clumps in the larger pieces of tissue. In between the mechanical purification steps, the tissue is allowed to grow on appropriate media, either in the presence or absence of selection. Over time, a pure population of fluorescent cells should result.

### Example 9

### Regeneration of Cotton Plants from Adchromosomal Cell Clones (Prophetic)

[0402] Cotton MCs are used in stable transformation to successfully regenerate adchromosomal cotton plants. The cotton MCs represent candidate cotton centromere sequences for the delivery and transmission of stable cotton MCs.

[0403] While the invention is susceptible of embodiment in many different forms, specific embodiments thereof with the understanding that the present disclosure is to be considered as an exemplification of the principles of the invention and is not intended lo limit the invention to the specific embodiments illustrated. It should be understood that various changes and modifications to the presently preferred embodiments described herein will be apparent to those skilled in the art. Such changes and modifications can be made without departing from the spirit and scope of the present invention and without diminishing its intended advantages. It is therefore intended that such changes and modifications be covered by the appended claims. All cited references are incorporated by reference herein as if set forth specifically in this specification.

### CITED NON-PATENT LITERATURE

[0404] Abel, P. P., R. S, Nelson, et al. (1986). “Delay of disease development in transgenic plants that express the tobacco mosaic virus coat protein gene.” Science 232(4751): 738-743.
[0405] Abremski, K., R. Hoess, et al. (1983). “Studies on the properties of P1 site-specific recombination: evidence for topologically unlinked products following recombination.” Cell 32(4): 1301-1311.
[0406] Altschul, S. F., W. Gish, et al. (1990). “Basic local alignment search tool.” J Mol Biol 215(3): 403-410.
[0407] Aoyama, T. and N. H. Chua (1997). “A glucocorticoid-mediated transcriptional induction system in transgenic plants.” Plant J 11(3): 605-612.
[0408] Ausubel, F. M. (1987). Current protocols in molecular biology. Brooklyn, N.Y.
[0409] Media, Pa., Greene Publishing Associates; J. Wiley, order fulfillment.
[0410] Benson, G. (1999). “Tandem repeats finder: a program to analyze DNA sequences.” Nucleic Acids Res 27(2): 573-580.
[0411] Bevan, M. W., R. B. Flavell, et al. (1983). “A chimaeric antibiotic resistance gene as a selectable marker for plant cell transformation.” Nature 304(5922): 184-187.
[0412] Bonfield, J. K. and R. Staden (1995). “The application of numerical estimates of base calling accuracy to DNA sequencing projects.” Nucleic Acids Res 23(8): 1406-1410.
[0413] Bowler, C., M. Montagu, et al. (1982). “Superoxide dismutase and stress tolerance.” Annu Rev Plant Physiol Plant Mol Biol 43: 83-116.
[0414] Callis, J., M. Fromm, et al. (1987). “Introns increase gene expression in cultured maize cells.” Genes Dev 1(10): 1183-1200.
[0415] Carlson, S. R., G. W. Rudgers, et al. (2007). “Meiotic transmission of an in vitro-assembled autonomous maize minichromosome.” PLoS Genet. 3(10): 1965-1974.
[0416] Cavaliere, F. M., G. L. Scoarughi, et al. (2009). “Interspecific transfer of mammalian artificial chromosomes between farm animals.” Chromosome Res 17(4): 507-517.
[0417] Cheng, Z., F. Dong, et al. (2002). “Functional rice centromeres are marked by a satellite repeat and a centromere-specific retrotransposon.” Plant Cell 14(8): 1691-1704.
[0418] Chowrira, B. M., P. A. Pavco, et al. (1994). “In vitro and in vivo comparison of hammerhead, hairpin, and hepatitis delta virus self-processing ribozyme cassettes.” J Biol Chem 269(41): 25856-25864.
[0419] Chrispeels, M. J., D. E. Sadava, et al. (2003). Plants, genes, and crop biotechnology. Boston, Jones and Bartlett Publisher.
[0420] Cottarel, G., J. H. Shero, et al. (1989). “A 125-base-pair CEN6 DNA fragment is sufficient for complete meiotic and mitotic centromere functions in Saccharomyces cerevisiae.” Mol Cell Biol 9(8): 3342-3349.
[0421] Czapla, T. and B. Lang (1991). J. Econ. Entomol. 83: 2480-2485.
[0422] de la Luz Gutierrez-Nava, M., M. J. Aukerman, et al. (2008). “Artificial trans-acting siRNAs confer consistent and effective gene silencing.” Plant Physiol 147(2): 543-551.
[0423] Dunwell, J. M. (1999). “Transformation of maize using silicon carbide whiskers.” Methods Mol Biol 111: 375-382.
[0424] Fitzpatrick (1989). “Pleiotropic gene found in barley plant.” Gen. Engineering News 22: 7.
[0425] Gatehouse, A., F. Dewey, et al. (1984). J. Sci. Food. Agric. 35: 373-380.
[0426] Guerrero, F. D., J. T. Jones, et al. (1990). “Turgor-responsive gene transcription and RNA levels increase rapidly when pea shoots are wilted. Sequence and expression of three inducible genes.” Plant Mol Bio115(1): 11-26.
[0427] Hall, A. E., A. Fiebig, et al. (2002). “Beyond the Arabidopsis genome: opportunities for comparative genomics.” Plant Physiol 129(4): 1439-1447.
[0428] Hammock, B. D., B. C. Bonning, et al. (1990). “Expression and effects of the juvenile hormone esterase in a baculovirus vector.” Nature 344(6265): 458-461.
[0429] Haseloff, J. and W. L. Gerlach (1988). “Simple RNA enzymes with new and highly specific endoribonuclease activities.” Nature 334(6183): 585-591.
[0430] Hawkins, J. S., H. Kim, et al. (2006). “Differential lineage-specific amplification of transposable elements is responsible for genome size variation in Gossypium.” Genome Res 16(10): 1252-1261.
[0431] Hilder, V. A., A. M. R. Gatehouse, et al. (1987). “A novel mechanism of insect resistance engineered into tobacco.” Nature 330(6144): 160-163.
[0432] Kato, A., J. C. Lamb, et al. (2004). “Chromosome painting using repetitive DNA sequences as probes for somatic chromosome identification in maize.” Proc Natl Acad Sci USA 101(37): 13554-13559.
[0433] Lee, C. A. and M. H. Saier, Jr. (1983). “Use of cloned mtI genes of Escherichia coli to introduce mtI deletion mutations into the chromosome.” J Bacteriol 153(2): 685-692.
[0434] Levings, C. S., 3rd (1990). “The Texas Cytoplasm of Maize: Cytoplasmic Male Sterility and Disease Susceptibility.” Science 250(4983): 942-947.
[0435] Liu, L., W. Guo, et al. (2003). “Inheritance and fine mapping of fertility restoration for cytoplasmic male sterility in Gossypium hirsutum L.” Theor Appl Genet. 106(3): 461-469.
[0436] Loomis, S., J. Carpenter, et al. (1989). “Cryoprotective capacity of end-products of anaerobic metabolism.” J. Exp. Zool. 252: 9-15.
[0437] Lorence, A. and R. Verpoorte (2004). “Gene transfer and expression in plants.” Methods Mol Biol 267: 329-350.
[0438] Luo, S., A. E. Hall, et al. (2004). “Whole-genome fractionation rapidly purifies DNA from centromeric regions.” Nat Methods 1(1): 67-71.
[0439] Ma, J. and S. A. Jackson (2006). “Retrotransposon accumulation and satellite amplification mediated by segmental duplication facilitate centromere expansion in rice.” Genome Res 16(2): 251-259.
[0440] Mariani, C., M. D. Beuckeleer, et al. (1990). “Induction of male sterility in plants by a chimaeric ribonuclease gene.” Nature 347(6295): 737-741.
[0441] Matz, M. V., A. F. Fradkov, et al. (1999). “Fluorescent proteins from nonbioluminescent Anthozoa species.” Nat Biotechnol 17(10): 969-973.
[0442] Mialhe, E. and L. H. Miller (1994). “Biolistic techniques for transfection of mosquito embryos (Anopheles gambiae).” Biotechniques 16(5): 924-931.
[0443] Mori, H., A. Kondo, et al. (1986). “Structure and function of the F plasmid genes essential for partitioning.” J Mol Biol 192(1): 1-15.
[0444] Murdock, L., J. Huesing, et al. (1990). “Biological effects of plant lectins on the cowpea weevil.” Phytochemistry 29: 85-89.
[0445] Needleman, S. B. and C. D. Wunsch (1970). “A general method applicable to the search for similarities in the amino acid sequence of two proteins.” J Mol Biol 48(3): 443-453.
[0446] Phelps-Durr, T. L. and J. A. Birchler (2004). “An asymptotic determination of minimum centromere size for the maize B chromosome.” Cytogenet Genome Res 106(2-4): 309-313.
[0447] SanMiguel, P., B. S. Gaut, et al. (1998). “The paleontology of intergene retrotransposons of maize.” Nat Genet. 20(1): 43-45.
[0448] Schwab, R., S. Ossowski, et al. (2006). “Highly specific gene silencing by artificial microRNAs in Arabidopsis.” Plant Cell 18(5): 1121-1133.
[0449] Sun, X., J. Wahlstrom, et al. (1997). “Molecular structure of a functional Drosophila centromere.” Cell 91(7): 1007-1019.
[0450] Symons, R. H. (1992). “Small catalytic RNAs.” Annu Rev Biochem 61: 641-671.
[0451] Unger, E. A., J. M. Hand, et al. (1989). “Isolation of a cDNA encoding mitochondrial citrate synthase from Arabidopsis thaliana.” Plant Mol Biol 13(4): 411-418.
[0452] Watrud (1985). Engineered Organism in the Environment: Scientific Issues. H. e. al., American Society of Microbiology Washington D.C.
[0453] Wendel, J. and R. Cronn (2002). “Polyploidy and the evolutionary history of cotton.” Adv Agron 78: 139-186.
[0454] Wolter, F. P., R. Schmidt, et al. (1992). “Chilling sensitivity of Arabidopsis thaliana with genetically engineered membrane lipids.” Embo J 11(13): 4685-4692.
[0455] Xu, D., X. Duan, et al. (1996). “Expression of a Late Embryogenesis Abundant Protein Gene, HVA1, from Barley Confers Tolerance to Water Deficit and Salt Stress in Transgenic Rice.” Plant Physiol 110(1): 249-257.
[0456] Yamaguchi-Shinozaki, K., M. Kozumi, et al. (1992). “Molecular cloning and characterization of 9 cDNAs for genes that are responsive to desiccation in Arubidopsis thaliunn: sequence analysis of one cDNA clone that encodes a putative transmembrane channel protein.” Plant Cell Physiol. 33: 217-224.
[0457] Yanisch-Perron, C., J. Vieira, et al. (1985). “Improved M13 phage cloning vectors and host strains: nucleotide sequences of the M13mp 18 and pUC19 vectors.” Gene 33(1): 103-119.
[0458] Zhao, X., R. A. Wing, et al. (1995). “Cloning and characterization of the majority of repetitive DNA in cotton (Gossypium L.).” Genome 38(6): 1177-1188.
[0459] Zhao, X. P., Y. Si, et al. (1998). “Dispersed repetitive DNA has spread to new genomes since polyploid formation in cotton.” Genome Res 8(5): 479-492.
[0460] Zuo, J., Q. W. Niu, et al. (2002). “The WUSCHEL gene promotes vegetative-to-embryonic transition in Arabidopsis.” Plant J 30(3): 349-359.

The application's sequence listing, which the Patent Office published only in electronic form, follows.

SEQUENCE LISTING (124 sequences)

SEQ ID NO: 1 - DNA, 2139 bp, Drosophila melanogaster
gttgtccgcagcggagatgcaactgatgcaacccacatttcagatcaccgacaacgtgcagcgcggcaactacgccactctgaccgacaaggatgtggcgcatttcgagcagctcctgggcaagaacttcgtgctcactgaggacctggagggatacaacatctgcttccttaagaggattcgaggtaggttgtgtaaccaaattcattcacattcgtgtgccctttaatgaatttctccgatgaattgcttcaaccaggcaacagcaagttggtgcttaagcccggaagcacggcggaggtggccgccatcctgaagtactgcaacgagcgtcgtttggcggtggtgccgcagggcgggaacacaggtctagtgggcggatccgtgccgatctgcgacgagattgtcctttctctagcgcgcctgaacaaggtgttatccgtggacgaggtcaccggcattgctgtcgtggaggcgggctgcatcctggagaacttcgatcagagggccagagaggtgggcttgacggtgccactggacctgggcgccaaggccagttgccacatcgggggcaatgtgtccacaaacgcgggcggagtgcgggtggtgcgttacggcaatctgcacggctctgttttgggcgtggaggcggtgctggccaccggtcaggtgctggaccttatgtccaacttcaagaaggacaacaccggctaccacatgaagcacttgttcataggatccgagggcactctgggcgtggtcacgaagctttcgatgctctgcccccattcctcgcgagcggtgaacgtggccttcatcggcctgaactccttcgacgatgtgctgaagacttttgtcagtgccaagcgtaatctgggcgagattctaagctcctgcgagctgattgacgagcgggccttgaacaccgccctcgagcagttcaagttcctgaagtgagttgcgccacctttgtcttctctgagcgttaccaatcctgttcacaaacttatttcccatagctcccccatttcgggatttcccttctacatgctcatcgagacctcgggcagcaacggtgaccacgacgaggagaagatcaaccagttcattggggacggtatggagcgtggcgagatccaggatggcaccgtaaccggtgatcccggcaaggtgcaggagatctggaagatccgcgaaatggtgccgctgggtctgatcgagaagagcttctgcttcaagtacgacatctcgctgcctctgcgggacttctacaacattgtggacgtgatgcgagagaggtgcggtcccctggccacagttgtctgcggatacggccatctgggggactctaatctgcacctgaacgtctcctgcgaggagtttaacggcgagatctacaagcgggtcgaacccttcgtctacgagtacacctccaagctgaagggcagcattagtgcggagcacggcattggcttcctgaagaaggactacctgcactactccaaggacccggtggccattggctacatgcgcgagatgaagaagctgctggaccccaacagcatcctcaatccctataaggtgcttaactgaaggcttctacctaatagattctattttttttgtttgtgtgtaattttcataaccttataatacagaaatggcattagaagtgaattttgttaacttgtgaagttaaaaaggaccatcatatttggcacgaaaccaatgggcaaaacttacttataaaatagtccgaaaaaatagtatataccagtttttacagtaccacattataggtactcggaggtaataatagaaaaaacactatctttgcatttactgttacactacgaagcactatatttagtagcagtactcattagagtccactcacaaaattagcaccaaccggcagtaattggtcaaggatcggcgatagcttcaaactccgaagttcaaagtcaaactgccgccctgcgaaagcttcgcgagtggagcttttctgcacttatcgatagctaacattgtggcgcgactatcgatcgacgagctgccgcttaacagtgccatatatagattgtaacattagaagctcaaatcattgttggagcacaaaccacaaagaacacacgaaac

SEQ ID NO: 2 - DNA, 2191 bp, Drosophila melanogaster
aaaatatttcacctcattttccgcacaccatttataagcaaagttacccccaacccataacttttatggtaagtaatacagaccctccaagttcggcaaatcgatacccagcgaccttgagcttgacatttatatatatgccagaatataacgaccacgtgctgtcaactgtgtcaggaaaagctcacccacactttctttggaggagctgtgctccctaaacgaatttcattgtcaaggtcgcacgcacaaaaatgaagaggaaaagctgaatgtgggtggaaatgccggccggcacgaccttgaagccagttgggtgagaaataaaaagcttttgccggtaggagacttgtggaacatcacccacaagtggcggacttggccttggcgatggccttgttggagctccctcagcaaaaatgttacatagggggaggaaataagctcaattggctttatgctttccgctccctggaagtccttttctggaatgttaaagtgttaaatgacatttattgaacatttgggacagaggaggagataatacaatatacttgtctaattaaaaaaaatcgttattatgatttattccatatgtaagattttaattcatcatgattgtaaataaattatataaaacaaattcaataaatttacattattgataaaatttattttttcatgaaattatacccaaaaattattctcaatttttcttataatcagttttgcataagtatactttcttcatacccctctaccacagccactgctttcttgactttgcaactatccgggaacagcttatcataatggatgagctgcagctaacggaaaatgggggagctgggatcaaacattttccaaggttgaaattgtcgtcagcataatgtttgagggagctggattcgcgttagcttgaaggtcaatccatttgggtgccctttgttatggtcaagtttaaggctgcaatagggggaatcttcaaggaccattacgcaaggttttcgcatcaaagatttgccgtgcaagctttttgagttgaaggatgcttaacttgaaagcgggttagtggttccaagagattttaggtgaaggagactccgctgttttgaaatatattaagtatgtaaagaagtatactataaataacccaaagtgatacaatgtaagaaaagatctcgttggtccctggtataaatttgtttgccattaatgaatattgaaaataataattatactaataataggtacaataagcaagattaaattgcatttaatcaccaaaaatcagtttctatgcgaaccaaaatgtcataacaaacaattgttgattcatccgtagtgaaatccaagttcgaaattcgaaatgagcatacgacgaccaaacttcccctcaaaattgctagactcagctagagcaagtacgcccaagttaacccctgaaattcgaaatgaattcgatgccgcgcttcgaacaacgaaatcccaaagagcttacgttttatttgacgtagcactcttacgtgaaatgattttccccaattccgctctcatttcccgagtctctcaccgcttctcagccactttcccaccccctttctagttccgaagtaaaggtaacaaaggcagccgtgtctttggggtggtaaactggcggtggtggtggcacattgtcagtggtgtgggttcctgtggttggtggttcaattggttggttgttggcataaacaaagcacacacacaatacacacaaactcccggggggtggtggaaattgggagggtgacattcactgcgagagaggaactcgcttcctataggaaagtacaaagagagctattttataaatgtgactgcagcaaggatatttacagtcagtccactctgaaacctcgacgagagaacattgaataacaagcggaagcgaaaagcgcagttgaaagttcgtcaaaaagcgacaagtttcctcgttcgttttcccgccaaatgagtcagaaaaattttccaagtgctcgatacgaaacataaagacttacaagacttaaagtgcaagcagtgaatggaatatattattcctcagcgatattgaaatcaaacattaaaaatatatgctacactaaagttatatatttttttaaagattcatacgttttgtaaaatcacattttgtattaaattaaataccgcc

SEQ ID NO: 3 - DNA, 2035 bp, Drosophila melanogaster
tgggtgcgtcgcaggtttcactggaaaacaatttgcacttttgtttgtggagtcgacaacaaaagcattcacttgtctaagactctctcattcataactcgcactttagttcactgaaccgcacgcaaaactttggggcggacaacatgttttcgaggtgccaaaagcttcataaaactaccaatccattagattaaattccaggcggtacatcttttggggatgattcatgtggcaggggttctctactcgtttacaatcatatcatcatcttcaagatcatatagtttatcatatcagtagagtactacaatataatgcataaactaagccaaataactttatgacgcgtgcttatgcgaaagtaaactttattatcaaatttacttaaccgtgaaatcaaaacctttatataaacacgaatattattatctttgctaaataaaactctcgcttaacaaacaatgacacttcaattccaacatagagtttatcttaagccaataaccaaaaacggaacttacataacttgccaacaaacatatgaatatagctatttcggatcgtgggagaccattatgcatacaaggcacgctcctaaaaaccgtgttaaacaaatatatgtcaaatgtatatcttaaaaaagcgcgcacatatcttttgaaatatcttcacccagagtatgtatgagattaaactggattagcactaagccacagcttctgtagatagaaattttatgcagagagtagattatttggctgctgagcaatttgaccaccacaagatagcagagaacatctgacattttctatatccatataataaaactgacttaacactaagctgaagtggtatgtttaaatcctccagctaataaatcgagactaaacgccctatcttatagtgatatataatagtatctatatgtgtattgtcatttactgtttatgagtatttgaaaaaaccattctatattttataggttagttaataaatattttgatatacatatgtagattggctcacacgtacttatgacccactacataataaaattgttttgttttttaatagaataatggtttataaaaagtttagactcacacggaaatgataaactctttgcaaatacagctttcattttattacaaattgcactctttcagatctgcagttgctatgccaaccttttattccctttactaaaagggtatactaggcttactgaacagtatgtaactggtaaagtaaagcgtttccgattctataaattatatatctaaacttttgatcagtcgaatccatctgaacacattctgtcacattagattattccagaaactcaacttaaacatgtgtattttttaagaccattatcaaggatattaaaaatggtctcctaaaatttaataaacaaaagtgtcacatcaaatttaagacgtaaattaatattttttttctatggtgaaataattgttattttccaatgttgtgaaataataaatgtatcttttcaacgcacacattttcaaggttttaataataatagtgactcgtgcgtgaataagagagaaattaagattttaaaaaagaataaaattcagagatgtgatctgtaaaaattatttaccaattttcatttacccccgaaagtgatgctaatggttaaaacggcatttgcgacttatctcctacgtaatattgcaaaaataaggatttggttagatgagtgtgaagtaaacaagatgcaaagttttggagatagaaaacatagccttgagtcttggtcatgtttacttggcaccaggccgcgattatcagcgctactagtcgtaatttgagttagacctttaatactctaagtgagagtgatgatatacgatttcccagccacttgctttctacgaaatgcgctaaaaaaaatccctaactacacaaagatttgtgttgttatccaggtgttctgatataaaaggcggcaaggaaattgatggcatcatcagtatcaaagtgagagtgattgcagtcacac

SEQ ID NO: 4 - DNA, 2136 bp, Drosophila melanogaster
atgggacggtcctattctcagcaaaaattgacaagaacaacaacaatgtctatggaaaatcgaacttcatcccagcacctgcagaaatcccgagcgagtcggggaaaaagtatttaacccccgaaagggttttccccaaaataatgaagtaatgaatgaagcggaaaacactggccgccaatctacctaatactaatgagcgggccaacccgaccaggaatttttgcaagtcaggtacttcaacggatatatgggttcgacaagtgcggattttcccgcgacatcaatgaggacttggccgggttatccgcggtgctcatcgggcaattccgcggccgaggacttcatcgtagtgatcattaggtagatatgtgcatggatgtgacatggcgatcattgcgcggaataacacacgtaataaccgagatatccgggatgacccaccaggtaggatgtgaggacatatagaaaacccccagccagtttttccactcgtcgtggcttgttttgcttgagtttcgctgactgcgtaattggataagatgggaaattactttaaatccttcgctgatccacatccggacattcgtcgaaggaaaatccattgcagggaaatacgaaatggaaatgcggctgggttattggctcgacatttcccatcttccctcacgccattggttgcaggatcgcggggaattggaattccgcgctggaattttttgtcacctcttgggtttatcaaaacttttgggtttgctatggattttttccaattttaccaccgcgcctggttttttttttttgacgacgcggaaaatcggacttggctatgcgggcttgtctgtttttccgggtacaaagtctgcatgtcagcctccatgcgggagtgggagttgggaaagtttcccatcgatagttggaggggtggcttgaaagtctggaggtgctagctgggaaagttgtgtgtgcgcgatgaggcaaggagtcaaagatcaggggagttggaaagcgagaattgtgggaatcgtccaggactcagctggatgctgaggggcagtatgattttttttacgttatcaatcgaattgattttaagacagcagaacttcacatactaataagatgaccatgggattagttaaaatgtgtaactcgtattcgaatcgtcattctttcacggaccaatcgtgggaacaggagatctcttcgatccaagctcacaggagacttgacactcttcgtctattccttgtcaagtttttaatgacatctcctatgccctgagctatgttttcctagctctcatcgatcgctgccaatgagccactggagatgatccataagtcagcgtagagtgcaccccagagttgacacttggtgtctcggaattcggctcattatcagtgctatttttggaacacctctctgcgaaggtgtcatttttgtcagtgcgtatcgctcaggttcaactccccaccaaaaaccgaatttagagcatcggcagatgtacttgaagcactcaatctaagtgaggaaaccaccccatgaacgaagagtactaggagtcctatttgactcgtgcttaaaaatagaaaattacttagggtgatccataggtagggaggcgatattgtaacttgcatttcggacccggacctgcacgagttattacgggtgggttgtgagcgtatcgggaaattggagagccaccagatctgtcataacttatacgggggatccttattcctgggagggtgcgcctgcgtctgctcttccgagagagaggtgggaaatggaggaagagagagagagagagagtgagagagcaggtagagggaagtgagggaaatacgcaataagggtatgggaaaagtgctgttgttgttgctaggtagcgacgcacacgtgcgagtgtttttctgttttgaagaagaaccaccaccaaatggcgacagcggcgtcggcagaggcgcagagttccgggtataaaagagcgtgctcgactgttgacctgtcacagccacctcagctctcgttgagaacgcaaccaccgctctatactcgatcccgaactatataactcgcctctcgatcgccgatctcccgatttacccatctcgatcagtaccggaaacc

SEQ ID NO: 5 - DNA, 2015 bp, Drosophila melanogaster
atttggctccccatcgccatcggttgctccaatgacactagggaattgtgggccgccgacagctgtccttaattacatggaaatccacactagattcgtgcccctcgccccgtactcgcagccgaagtccccacagagtcattcaccttgccaccaccaaaaaaaaaacgaaagcaactgaaggaaaagttcgattcgaaggctgagggatacccttaaaggcccatttcccggcttcgtaaatcacatttagttagccatttagactacagcaagtcttttaagatacactgcaaaataaataccattacattaatagaagtgtcatgtcatcggtctgtatttttgttaccacagaatagacttacatatatgataaaaaaatgttcaacaataagttacatcggtagccaattctatagatttaattccttacgaatatagtttcgttggaatactcaatttgtaattgtaattaattataattattataattttaagaatttatataagtaactaaaagacacggcagacacagaatgaaaacactctatgttagggaatgcaaaaaaacgtggcggaagccaaaaggcgcaagcaaaaatcgaaaccaagtgaatataacatattatttcaacaggcaactcattcagcatataatattaccacccatggagctttatgtagttgatgtacgtagtctatgatgtggagcccacgttggcggaactgggaatggggattggggtttgagagctgtggtaaattggggggttgaagtatcaagggtttgggttctgtagacctgcggaatcgaggtgaataagcgaagaacacattcacacacactaaaaggcaaacaaagggaaatcaatctttgtacatacttttagcatatgcacacgtatgatctccacccacttttccctcccaatgaaacaaacacacacacacatgcaaggccgtacgtttgtatatgtgtgcggttgtcggctttgccgggaattggggaatatttgcatgcctttgtgtactttttccatatgatttatgacctaaattgttgctgctcgcgcacatataattacacacacatcgctgtggccatgtgtgtgtgtgtcgtcttgggacgcgcgccaaagtatgctacactttttgttttatgagttaataagtaggcgtggccccagcccaattgctacactctgattatggcaccggatacccagatagacgcccatccaccccactgtaagatgggggaatttccaaacctatatgtatgtgcagatcagataggatagcacagaactttttaaagtacacttttggggcacgcaatttagaaaatgtacctcggtgtcggagaaattattttaaaagtcgactgaaccacctcgttccatatggagaagtctacgagttcaagtttaatggagcagctgactgcactgaattttgtagtttaatacacaaatccgcaaattgcatctcacttcaaatagcctggtacatagtatctactaacataactcatattaaaataaagcaaccaaccagagggccgaagttctattaataaaactaatatttaactattatatatacattttatttacttggtacgcttatgataaccttcgaaagagaaccaacacaatacgctttgtcatttgaaaaataaatatgctgtaactactttacaaggtgaaactcttgtcagaagataagaggctaggtaagttgattattcaatcagtttacttactgcaacccaaaatggtcactgcactaaccttcagatgagctgcactacaccctcaatcgagaatcaatgcaaacgcagtgccagcgaaaatgtcagcaagggattaggccaatcccaaacgggtaatcccgctgcgacaatgctaatccaattccgatgggccgtataaaagccccaagctgggctggctgtgatttcgtcttggcccgcagaccggagcatggagtccggtaacgtgtcgtcgagc

SEQ ID NO: 6 - DNA, 2082 bp, Drosophila melanogaster
atcgatgacggcatcggcttgacctctcggagtacgtttgattttatagaacaagttttctcctttcttatactataaggaaaaattataaaaattgctgaaaatgaaacatggctagaattcgttttttaacattttttcaatctgagaaaaaatttccgattagtcttaaaataactaaaccaattcgtatacccgttaatcgtagaagaaaaatgaaattcatataataagtagatggatttgctgacccggtgaggtatatatgtattcctgaacatgatcagtaaacgagtcgatctggccttatccgtatgaacgtcgagatctcgggaaatacaaaagctagaaggttgagattaagtatgcagattctagaagaagacgcagcgcaagtttgcgactacgctgaatctactgctaaaaactgccacgcccacacttcttaagaatttgatttattttcacaagctgaggaacggtagggtcgaggaactcgactacaacgttctgccttgtttatttcttaacaaaaacttagtagccgtttgggttggaaaccacctgaccttaggtctggtagcagttatttaatttattttttttattttatacaacttgctcgctgtttgttccccctagccctgaaacacaagctgtcaaacggtggaggtgataagtctaatgaatgcgataagctttatttcaattcgcaattttcgtgtggcattttggcaaaaaaaaaaactcgtcggacatacatgttgccacaaacataaagtgaatacataatgttgggtgaacgactcatacacgattgtggcaaatcaaattcttttaacacgggacggggaaaggcgagtgaagatattttagcatatatttagcacatctgttaaatccatttttttactctccgttttcggccagatatggttagaaaagaaaaaaattagtacatacccccatatataataagaaaaaaagagagagtcagcagaagtacggggagcttaagtgtagcaatcagaacatcacaaatagtaaataaattaataataataataatcatatccaaaaatatttttattcctaacctatcgcattgttacatcgagggtgaaattcaaaatagacaaaaagttggggaataaaatgtgaaaaaagtggtaaaatgtttaatagtgtgggcgttactgttttgtcggtgtgaggtgcgtggccaccaaagtgtttttggtataacgatagaaattggtaagacaaacaatattgcgaagaaaacccgaagcatttttaaaaagtgcgaacgtggcagttttaagggtttgtgggcgtggcaataatttttggcaattcgataaaaatgtacaggaccaaatatatgaagaaatataaaatatttttcaaaatgacagccagcaaccatacatatatataaataaatgtcggagacccttccttctacctgtaacatacttttccacgaatctagtattggttgatatataattatgctgtgtataagaccaaaatcagtgtacatttccattggattcaccaaccggatggttccggatggtaatgcaaaatattcatctaagaaacgaaaacacctagaattaaacctgaactgatatgacttatgcacatatcagtgaggtgggcagttcaaagcaatcacgatgctccaagttattatcgcagtgcagtgaaaaattcacagtcaccgtcgccaattgccaataaagatcggccattatacaacagaaccgcgttgaagacgatcgacgaggtcgtgggtcttatcttatcaccacctgaattgaggcatgcctccagaatgacgagggcatccgaagataatgtggcccgctattttcggccgggactggacctatgcgacgacctatgctgatgacgggagtctgccgctgatatggtgcaatgcaaggctccagtcgggggtataaaagacccagtttcggtgcagtcaagacaacagactttaggtgttggtcgttgagcgaaccaaagccggagcagttgaggaaccaaagaatagcagcgagaggaccaagg

SEQ ID NO: 7 - DNA, 1999 bp, Saccharomyces cerevisia
tgtagggacccaaatccaattgtagtagttaccttgattatggttggcttgtccttcgatagttttgccttttccaaagcgctagaaatggattccatatcgtcgtctcctttatcgacttccatgacttcccaaccatatgcctcgtatcgcttcaaaacatcttcgtcgaacgagtacgaggttttaccgtcaatggaaatgctattactgtcataaaacgtaatcaagttacccaattgcagatgtcccgctaaggaagaggtctccgaagaaacaccctcttgtaagcaaccatcccctacaatagcaaacgtatatgagtcggaaatgggaaagccatcctcgttataagtggcggcaaagttggcctgcgctattgccataccaacagcatttgagataccctggcctagcggaccggaagtgatttccactcccgctgagtggaattctggatgacccggtgtccttgagtttacttgtctaaattgtctcaagtcctcgatagagtaatcgtatcctaatagatggagcattgagtacagaagagcgcatgagtgaccgttcgacagaacaaacctgtctctattgatccaatgttcattgttagggttacagcgcagttgcttgaaaattacatgggcaactggtgccaatcctagtggtgcacctgggtggccagattgtgcgctttccacctggtcaacggaaagtaatcttaaagtggaaaccgcaagtttatcaatgtcggagaactgtgccatttttttgttctttttttgattagtaaggtataatcgtctacgtagaggttacaaatcgaagactacagtaagaggggacaagccaattgaatatacgactgaaataaatggaataattctgcattattacactcgtttatatatccaaacaggtgatctggtattctcttgacaacgaatgaagctccctatattcgacactccttattcaggactcctcccaacaaggagaagtaggtgttccttgagctaccctttaaagctggggagatgagcttgcccttcctgtcatcgccattatgacgagaaaagtaaaacatgtagaataaggtccacccaaacatgtccgagcaatgacgttatatatcgtgttccctgttcaaagcatggcatatgtgccattaaaggcgaatttttgtccctagcaaaggagagacagcgagccaccattaagaagtgacttgaaagcaagcgaaaatagctacacatatatatcaatatattgacctataaacccaaaatgtgaaagaaatttgataggtcaagatcaatgtaaacaattactttgttatgtagagtttttttagctacctatattccaccataacatcaatcatgcggttgctggtgtatttaccaataatgtttaatgtatatatatatatatatatatggggccgtatacttacatatagtagatgtcaagcgtaggcgcttcccctgccggctgtgagggcgccataaccaaggtatctatagaccgccaatcagcaaactacctccgtacattcatgttgcacccacacatttatacacccagaccgcgacaaattacccataaggttgtttgtgacggcgtcgtacaagagaacgtgggaactttttaggctcaccaaaaaagaaagaaaaaatacgagttgctgacagaagcctcaagaaaaaaaaaattcttcttcgactatgctggaggcagagatgatcgagccggtagttaactatatatagctaaattggttccatcaccttcttttctggtgtcgctccttctagtgctatttctggcttttcctatttttttttttccatttttctttctctctttctaatatataaattctcttgcattttctatttttctctctatctattctacttgtttattcccttcaaggtttttttttaaggagtacttgtttttagaatatacggtcaacgaactataattaactaaa

SEQ ID NO: 8 - DNA, 2001 bp, Saccharomyces cerevisia
tctgctattattgatgctttgaagacctccagacaaatttttcacagaatgtactcttacgttgtttaccgtattgctttgtctctacatttggaaatcttcttgggtctatggattgctattttggataactctttggacattgatttgattgttttcatcgctattttcgctgatgttgctactttggctattgcttacgataatgctccttactctccaaagcccgttaaatggaacctaccaagattatggggtatgtctattattttgggcatagttttagctataggttcttggattaccttgactactatgttcttaccaaagggtggtattatccaaaacttcggtgctatgaacggtattatgttcttgcaaatttccttgactgaaaactggttgattttcattaccagagctgctggtccattctggtcttctatcccatcctggcaattggctggtgccgtcttcgctgtcgacatcatcgctaccatgtttaccttattcggttggtggtctgaaaactggactgatattgttactgtcgtccgtgtctggatctggtctatcggtatcttctgtgttttgggtggtttctactacgaaatgtccacttctgaagcctttgacagattgatgaacggtaagccaatgaaggaaaagaagtctaccagaagtgtcgaagacttcatggctgctatgcaaagagtctctactcaacacgaaaaggaaacctaatcctgttgaagtagcatttaatcataatttttgtcacattttaatcaacttgatttttctggtttaatttttctaattttaattttaatttttttatcaatgggaactgatacactaaaaagaattaggagccaacaagaataagccgcttatttcctactagagtttgcttaaaatttcatctcgaattgtcattctaatattttatccacacacacaccttaaaatttttagattaaatggcatcaactcttagcttcacacacacacacacaccgaagctggttgttttatttgatttgatataattggtttctctggatggtactttttctttcttggttatttcctattttaaaatatgaaacgcacacaagtcataattattctaatagagcacaattcacaacacgcacatttcaactttaatatttttttagaaacactttatttagtctaattcttaatttttaatatatataatgcacacacactaatttattcattaattttttattgagtaggatttgaaaatatttggtatctttgcaagatgtttgtatagagggacaaagaatcgtctttattatggtcaaggctttacgtcataatagttcctgcccagctcttctataatactttaaagatctcttctcgtttgctccatttggaagtctcgcttacgtttatgcgcccatacagacactcaagatacacacttacatgaacgtatacaaatttactaacactacttgaaaatatgaaccacagtacatcatattaagacgtagtattcgatgattgaaggccgcctccgcgaaatacctttactgattttgccggttaatcgcatcgaaatttcttcatcacaagaaagcaaacaaatcgccaggccattctacaagtttccttttcttatgaagatgtaaaagctactaaggcgtcattactctagatgactcagtttagtctgaccttctatagtatactaccctggcgctatgatgatgagcggttcttttattgcggaaacgaaaattccgggaccggcgaaatttgcccggttttgtccgtaaccggcttcatgagtcggcttcaatagtagttgaatacttatttaaacagcagaacttaactcactcatcacgctgtttccgctgaattttctcaaaatatctaagcagtcaacaaatataaagaatattgaaattgacagtttttgtcgctatcgatttttattatttgctgttttaaatc

SEQ ID NO: 9 - DNA, 2000 bp, Saccharomyces cerevisia
ccaaatcattcttattcggtttccagacggtaacaataccctcgcccatcccacacaaaagggtatctgctacttcgggatcgacgaaacaaccacaaagaacttcgtcctcctgatcatcgctgatcaaaattttaccatcctcgtttccagctacgttcggtttggcatctttgtcgcgaacgtcaaaataagctaacgttgtctggcccaaagaaatgaatttatatgcagatcttttatcaaagtggaaaatatcgttgatagagtcgccaaaatgtatcgaacgaatggaatttgataatgccaagttttccgagtttattacgtgtatattaccggattcatcgcctattaaaatgaatgggtgagtttgagaggcgcataatttcgtaaatttatcattttttttctcttcagaattaaacagtgagcttaagtttacctttttgacgactttgccggtcatagtattggccttttttaaaacattatccgatccaacagaaaaaatattgtcacctttagaatcaaagcacatggcacggacactacctttatgtcttttagtcttccaaagtgtttttacgcccaagtcttcatcttttcctgtttgcttttgttgctgttgttcttcaatatcaacaaatttcaaatctccagtttctaggtctatatctaatctaatccaagggcatacacctttctttgcatccttgcctgtagttgcagtgtcaattctacgtctacgatctaggtgcgattgcaacttagcggggtcataacgatggcacacaatatgtcctgtaccaaagccagttattataatgggcagttcaggatgtaaaagagactggaaaatgggagcttttaatgatagtaattctagaatgggcaggtttgttgaatcgacaacatctgttttttttttgctctttgccatagctgatgcgtggattgtttctaatttcccagctgcttcctcttccaattgtggcgatgatgccatgatttctatgttaaaatttttctaaccatgaaattttttttttctagcgagaaaaaaaatcagaaaaattactattagtgagtattggagacattgtcaatgggagatgttctctttataatatcttcaacaggttctttcaactctggaaattcatccacaatcttgtcagcaagtgaatctcttaattgcttcaatccatgcatcttgcctctttgatattggttggatcttcttatggcttccacgaactctcttgtgtaaatatctggatttctaccgtcctcaatgtattgaacaacttccaagggaatgtccaccttagacaagctggattgaggatcgttgcttctcacgttcagcttgtacaagcgatccacatttctttgcaagttggtgatcattcccttggtggcttctggagtaccaggaaaatcatatatcgagacacctaattcaacgaaggactcaataatcgaagccacttggtcttgagtagtggccagttcttgctgcaattgttcattgttagtgctgtttccattcatcttatcggtttatttttctatatatttgcctctttctcaaacaggagttagtagttaaaagtacgaagttcttgttctttaatgcgcgctgacaaaagaattggataaaagagaatggtggggggacaagaaggaaatttgtcctagtttaacatgaatggcatcttgttaccgggtggacatcacctattgattctaaatatctttacggtttatcatactgttctttattccgtcgttattctttttatttttatcatcatttcacgtggctagtaaaagaaaagccacaacatgactcagcaaatctcgacaaagtaaaagctcatagagatagtattatattgatataaaaaaagtatactgtactgtttgtaaccttttcaatgctttaagatcaaaactaaggccagcaaaggtatcaacccatagcaactcataaa

SEQ ID NO: 10 - DNA, 2001 bp, Saccharomyces cerevisia
gaaaccattaaatcatatttaataaattgttgcgacatgcaagaagttcgcggatggtcatgcgtatttaagaatagtcaagtaacaatttgcttattcgttgatgatatgatattattcagcaaagacttaaatgcaaataagaaaatcataacaacactcaagaaacaatacgatacaaagataataaatctgggtgaaagtgataacgaaattcagtacgacatacttggattagagatcaaatatcaaagaagcaagtacatgaaattaggtatggaaaaatccttgacagaaaaattacccaaactaaacgtacctttgaacccaaaaggaaagaaacttagagctccaggtcaaccaggtcattatatagaccaggatgaactagaaatagatgaagatgaatacaaagagaaagtacatgaaatgcaaaagttgattggtctagcttcatatgttggatataaatttagatttgacttactatactacatcaacacattgctcaaccatatactattcccctctaggcaagttttagacatgacatatgagttaatacaattcatgtgggacactagagataaacaattaatatggcacaaaaacaaacctaccaagccagataataaactagtcgcaataagcgatgcttcatatggtaaccaaccatattacaagtcacaaattggtaacattttcctactcaacggaaaagtgattggaggaaagtcgacaaaggcttcgttaacatgcacttcaactacagaagcagaaatacacgcggtcagtgaagctattccgctattgaataacctcagtcaccttgtgcaagaacttaacaagaaaccaattattaaaggcttacttactgatagtagatcaacgatcagtataattaagtctacaaatgaagagaaatttagaaacagattttttggcacaaaggcaatgagacttagagatgaagtatcaggtaataatttatacgtatactacatcgagaccaagaagaacattgctgatgtgatgacaaaacctcttccgataaaaacatttaaactattaactaacaaatggattcattagatctattacattatgggtggtatgttggaataaaaatcaactatcatctactaactagtatttacgttactagtatattatcatatacggtgttagaagatgacgcaaatgatgagaaatagtcatctaaattagtggaagctgaaacgcaaggattgataatgtaataggatcaatgaatattaacatataaaatgatgataataatatttatagaattgtgtagaattgcagattcccttttatggattcctaaatcctcgaggagaacttctagtatatctacatacctaatattattgccttattaaaaatggaatcccaacaattacatcaaaatccacattctcttcaaaatcaattgtcctgtacttccttgttcatgtgtgttcaaaaacgttatatttataggataattatactctatttctcaacaagtaattggttgtttggccgagcggtctaaggcgcctgattcaagaaatatcttgaccgcagttaactgtgggaatactcaggtatcgtaagatgcaagagttcgaatctcttagcaaccattatttttttcctcaacataacgagaacacacaggggcgctatcgcacagaatcaaattcgatgactggaaattttttgttaatttcagaggtcgcctgacgcatatacctttttcaactgaaaaattgggagaaaaaggaaaggtgagagccgcggaaccggcttttcatatagaatagagaagcgttcatgactaaatgcttgcatcacaatacttgaagttgacaatattatttaaggacctattgttttttccaataggtggttagcaatcgtcttactttctaacttttcttaccttttacatttcagcaatatatatatatatatttcaaggatataccattctaa

SEQ ID NO: 11 - DNA, 2001 bp, Saccharomyces cerevisia
cactaccaccactacggttgtccatgacgtatcctgcgattttttgaattaatgattcaatagttgacatttgctcgtcattggggttcgactgagctgcggatgtcaacttcgcaacagcttctgcatggtttccttgagaaaaatgagactcagcctctgagattaacttatccgtatccatttcagatctttgctatacgtttgtatcgctatatgtacgttcttttaatgaactttctcctttctttatcgtgtagcttgcttgggtatcttttaatgagttgcggacagtgagatttttcagaagggcaattggccaagacaccaaaaacgtttggacgagacaggcatcaaaggacaaggtaaaaggcgttgagctgtggctggctgtgtatgcgtttgaaataccatggatagatatcaaagaaagataggatgtttcatacaaatcccaaatttggggcgcggacaactgaaatacgtgggtccagtggacacgaaagctggaatgtttgctggtgtagacttacttgccaacattggtaagaacgatggatcattcatggggaagaagtattttcaaacagagtatcctcaaagtggactatttatccagttgcaaaaagtcgcatcattgatcgagaaggcatcgatatcgcaaacctcgagaagaacgacgatggaaccgctatcaatacccaaaaacagatctattgtgaggctcactaaccagttctctcccatggatgatcctaaatcccccacacccatgagaagtttccggatcaccagtcggcacagcggtaatcaacagtcgatggaccaggaggcatcggatcaccatcaacagcaagaatttggttacgataacagagaagacagaatggaggtcgactctatcctgtcatcagacagaaaggctaatcacaacaccaccagcgattggaaaccggacaatggccacatgaatgacctcaatagcagcgaagttacaattgaattacgagaagcccaattgaccatcgaaaagctacaaaggaaacaactacactacaaaaggctactcgatgaccaaagaatggtcctcgaagaagtgcaaccgacttttgataggtatgaagccacaatacaagaaagagagaaagagatagaccatctcaagcaacaattggagctcgaacgcagacagcaagccaaacaaaagcagttttttgacgctgagaatgaacagctacttgctgtcgtaagccaactacacgaagagatcaaagaaaacgaagagagaaatctttctcataatcaacccactggtgccaacgaagatgtcgaactcctgaaaaaacagctggaacaattacgcaacatagaagaccaatttgagttacacaagacaaagtgggctaaagaacgcgaacaattgaaaatgcataacgattcgctcagtaaagaataccaaaatttgagcaaggaactatttttgacaaaaccacaagattcctcatcggaagaggtggcatccttaacgaaaaaacttgaagaggctaatgaaaaaatcaaacagttggaacaggctcaagcacaaacagccgtggaatcgttgccaattttcgacccccctgcaccagtcgataccacggcaggaagacaacagtggtgtgagcattgcgatacgatgggtcataatacagcagaatgcccccatcacaatcctgacaaccagcagttcttctaggcagtcgaactgactctaatagtgactccggtaaattagttaattaattgctaaacccatgcacagtgactcacgtttttttatcagtcattcgatatagaaggtaagaaaaggatatgactatgaacagtagtatactgtgtatataatagatatggaacgttatattcacctccgatgtgtgttgtacatacataaaaatatcatagcacaactgcgctgtgtaatagtaatacaatagtttacaaaattttttttctgaatac

SEQ ID NO: 12 - DNA, 2001 bp, Saccharomyces cerevisia
acaatgaggaagaacatgccgttttacaagaattaaatagtttaacccaaagaattaatgaactaggcatggaaagtataaattcaaactccgattcggacagaataaacgggtcatattcacaagtggattttggtaacaataacgacgaggacgatatgaacctgttcgacccagattttatggcacaagaccaattgcgtgctgaagaaagagactacaacaaggatgatagaacacccttagctaaggtccctgcggcctttcaatcaactggattgggcataacccccgatgacgatatcgagagacaatacataacggaacacagatcacgacatgaagtgccaaagcggtctcccgagaaaccctccaacccgctggaaataggtaacccatacgcgaaacctggcacaaggttgaataccactcacacccacagcaaaactgatcgtagcattacccctcagaggggccagccagtcccatcaggccagcagatttcctcctacgtgcagccagcaaacattaatagtcctaacaaaatgtatggtgcaaacaactcggcaatgggttcgcccaggaatccaaagacgagagcgccaccaggtccatacaatcagggatggaataaccgcccctcgccttcaaatatttaccaacgtcctcatccctcagatacacaaccacaagcatatcatctccccggaaacccatactcaacggggaacaggccaaacatgcaagcgcaatatcacccgcagcaggtgcccatgcctatcctgcagcagcccaatcgcccgtaccaaccttatgcgatgaatacgcacatgggctctcctggcggatatgctggggcagcaccaccatttcagccagctaacgtcaactacaatactaggcctcagcagccatggcctacacctaactcaccatccgcacactaccgtccgccccctaacctgaaccagcctcaaaacggtagtgctggttactatcgtccgccggcaccacaattgcaaaactcccaagcccgtccacaaaagaaggacggattctcacagttcatgccatctgcaactacgaagaacccatatgcccagtaactcgaccgactggttgtaattttacaaaaagagagacaattaagaaaagaaacaagcgccaggcttccgtatcccagtttttcatctcactttctgggcacgattgtaataatacttcatgataataactaaactatataagtagtgtctcatccgtaaatatacatttagacagattcttgtattttctccgggcaatttttaactttttttctgttagggcacatgacacttgcctattatggacagccagtaaagatgtgccatatattgccccctttacgctctctgccagtattagtgggaaaaaaaaaactgaaaaaaaaaaaatcgcagactactaataatcacgtgatatttcttttcactctcttcataaagttgctaaaaacacacaatcgaatgagcctctgagcagtataaattgtacttcaaagcactagtcatgaaaaacgcttacattagttcagtttgtcaaggttatgctattacttgtacttatttcttgctattgttagtggctccccacattgacgtattttcacgtgatgcgcctcactgcggaaggcgccacacattgcctgcaaaaaattgtggatgcactcatttgatagtaaactaagtcatgttaatcgtttggatttggcacacacccacaaatatacacattacatatatatatatattcaaaatacagctgcgtccaatagatgagcttccgcttcgttgtacaacctacctgctatcttgttcacggatatttcttgcttttaataaacaaaagtaactctagaacagtcaagtcttcgataatttttttagtcacagggtccgtctaaagtttctctttatttggaataatagaaaagaaagaaaaaaacgtagtataaaagga

SEQ ID NO: 13 - DNA, 2000 bp, Saccharomyces cerevisia
aaggatggcaaatacccaatcggaggaactcgaacacttcagtatctgtgtcttctagtgagtctttagcggaagttattcagccatcttccttcaaaagtgggagtagttcattgcattatctatcgtcttctatctcaagccaacctggttcgtacggttcttggttcaacaaaaggccaacaatttctcagttctttcaaccaagcccttctttaaaacacaacgagtcgtgggagaggctgcaaacaactgctggaaatatgcaaaggacttcaagttcgtcttctttgcagcaagcaacctccaggttatcactaaccactccgcaacaatcaccgtctatcagcgaatatgatgagtatccttggatgggcacacctggctctcctaatgttggagatgtgtctcacgcacccccattggttaagaatatatcatataaatttccactaaagaacgttgagttgaaaagagattgccaaaggatctctcaggatgatcttttggatgaggcttttgaaagaatatgtcagccctctttggctgaccttaattccacttacgaaatttttccaggtaactcttcttatgcggatattttgactactgattctgatattgatgatggcttgatgaataaacctctggaactattgccgaaatatacaatgtatttaacccattttaacaattttttccagttgcaagcatgtcctgctggtcaagaatcagagagcagaataacaaattctatgaagattgacctgttaaaggcggattacacaagaagtctattagtatcgttacgttcaagggacattagggatgtcgcattgaaaagagagtttactggcaataacaacaataacagcaaccagaatatctatgatgagaattttgtcggaaaaaggaagtacgtgttgaaacagaagaccagaaaaatcttttcctgtggcaagattggcaagctaagtactagtttggaaaactgcgttaattttgttgaaaatagtataaagagtgcaatgatgttatatgatgataatggaatagatagtgagcttcgcgattcagaagctttacggattttttcatctcttgttcattattgtaatgcaggttaatgttttctccttctttacatgtttaatatattccaagttacctaagaggtgtacgatatttttttcttttatatatatgattttctctattcattttttagttttttttgatacataagcgaatcgcacattgcgcaacttcaatttgttgattcgccaaagtattcttaccataaaacaaccattcgttgctttaccctttcgtaatcatttaccgtgataaccataatcagaaacttattatttcagcctagtagaccggccaagcaggccttgtaatgtttctcttgattgcttgaatcttttaagcagccaaatctttccaaaaaaatgcaattatcagaacaaaactatttaaggtgacttctccgtatttacaccaccagaagcgttctggctccccttttctctaaacgttaaacattttacaattgaaatgttaccaatcctatattattgtaccacattgccagatttatgaactctgggtatgggtgctaattttcgttagaagcgctggtacaattttctctgtcattgtgacactaattaggaaacttctcgactatcaatgtgtaaatgaaggaataatggcggaaactttgaaactttgtcaataattgcatcattggatgcgtttcatttggccgttatcacggagaggcagagttctctccacaatttgggcagaagtcttttgaaaagacatatatatatatatatatgtatatgagtggatgcttaaggtaagaataatttctgaattcccaagtattcattttgtgcagtattcacatattctattttattgctttttaactttagaggcaattaaatttgtgtaggaaaggcaaaatactatcaaaattttcc

SEQ ID NO: 14 - DNA, 2001 bp, Saccharomyces cerevisia
ttgccttcaagatctactttcctaagaagatcattattacaaacacaactgcactcaaagatgactgctcatactaatatcaaacagcacaaacactgtcatgaggaccatcctatcagaagatcggactctgccgtgtcaattgtacatttgaaacgtgcgcccttcaaggttacagtgattggttctggtaactgggggaccaccatcgccaaagtcattgcggaaaacacagaattgcattcccatatcttcgagccagaggtgagaatgtgggtttttgatgaaaagatcggcgacgaaaatctgacggatatcataaatacaagacaccagaacgttaaatatctacccaatattgacctgccccataatctagtggccgatcctgatcttttacactccatcaagggtgctgacatccttgttttcaacatccctcatcaatttttaccaaacatagtcaaacaattgcaaggccacgtggcccctcatgtaagggccatctcgtgtctaaaagggttcgagttgggctccaagggtgtgcaattgctatcctcctatgttactgatgagttaggaatccaatgtggcgcactatctggtgcaaacttggcaccggaagtggccaaggagcattggtccgaaaccaccgtggcttaccaactaccaaaggattatcaaggtgatggcaaggatgtagatcataagattttgaaattgctgttccacagaccttacttccacgtcaatgtcatcgatgatgttgctggtatatccattgccggtgccttgaagaacgtcgtggcacttgcatgtggtttcgtagaaggtatgggatggggtaacaatgcctccgcagccattcaaaggctgggtttaggtgaaattatcaagttcggtagaatgtttttcccagaatccaaagtcgagacctactatcaagaatccgctggtgttgcagatctgatcaccacctgctcaggcggtagaaacgtcaaggttgccacatacatggccaagaccggtaagtcagccttggaagcagaaaaggaattgcttaacggtcaatccgcccaagggataatcacatgcagagaagttcacgagtggctacaaacatgtgagttgacccaagaattcccattattcgaggcagtctaccagatagtctacaacaacgtccgcatggaagacctaccggagatgattgaagagctagacatcgatgacgaatagacactctccccccccctccccctctgatctttcctgttgcctctttttcccccaaccaatttatcattatacacaagttctacaactactactagtaacattactacagttattataattttctattctctttttctttaagaatctatcattaacgttaatttctatatatacataactaccattatacacgctattatcgtttacatatcacatcaccgttaatgaaagatacgacaccctgtacactaacacaattaaataatcgccataaccttttctgttatctatagcccttaaagctgtttcttcgagctttttcactgcagtaattctccacatgggcccagccactgagataagagcgctatgttagtcactactgacggctctccagtcatttatgtgattttttagtgactcatgtcgcatttggcccgtttttttccgctgtcgcaacctatttccattaacggtgccgtatggaagagtcatttaaaggcaggagagagagattactcatcttcattggatcagattgatgactgcgtacggcagatagtgtaatctgagcagttgcgagacccagactggcactgtctcaatagtatattaatgggcatacattcgtactcccttgttcttgcccacagttctctctctctttacttcttgtatcttgtctccccattgtgcagcgataaggaacattgttctaatatacacggatacaaaagaaatacacataattgcataaaatac

SEQ ID NO: 15 - DNA, 1999 bp, Saccharomyces cerevisia
ttttgtaagaaattattcaccgcatcttcatctggcaaacgaatgggagactttgaggaacccaatccatttctgaataacggagatttagaaatgtaaaaggtagcaaatgtaaaaagtgccaggaccatcacagcagtcaatgccaacaccaatttcccttgccatgacactgttggatcttttgaaggagatttgtaacctggaatctcactataatgaacacattcaccggattcacacttcaaagtaatataagggtcaccaaacacggtcaatatcaaatcattcatagaaggctcactgaatttacattgccttgtttctaaatcacagctgaaatctcctggcccttttattgtctctgtcaggaaatccgagatatctatagaccccttagcaccacacaacacagtgtcgggaacgcatttgcattgaacgtcattacacttataatgggaggtattctgttccaagtcgtattcaaaggcacaatcacttaagccacaatagaagctttctaactgatctatccaaaactgaaaattacattcttgattaggtttatcacaggcaaatgtaatttgtggtattttgccgttcaaaatctgtagaattttctcattggtcacattacaacctgaaaatactttatctacaatcataccattcttataacatgtccccttaatactaggatcaggcatgaacgcatcacagacaaaatcttcttgacaaacgtcacaattgatccctccccatccgttatcacaatgacaggtgtcattttgtgctcttatgggacgatccttattaccgctttcatccggtgatagaccgccacagaggggcagagagcaatcatcacctgcaaacccttctatacactcacatctaccagtgtacgaattgcattcagaaaactgtttgcattcaaaaataggtagcatacaattaaaacatggcgggcatgtatcattgcccttatcttgtgcagttagacgcgaatttttcgaagaagtaccttcaaagaatggggtcttatcttgttttgcaagtaccactgagcaggataataatagaaatgataatatactatagtagagataacgtcgatgacttcccatactgtaattgcttttagttgtgtatttttagtgtgcaagtttctgtaaatcgattaatttttttttctttcctctttttattaaccttaatttttattttagattcctgacttcaactcaagacgcacagatattataacatctgcataataggcatttgcaagaattactcgtgagtaaggaaagagtgaggaactatcgcatacctgcatttaaagatgccgatttgggcgcgaatcctttattttggcttcaccctcatactattatcagggccagaaaaaggaagtgtttccctccttcttgaattgatgttaccctcataaagcacgtggcctcttatcgagaaagaaattaccgtcgctcgtgatttgtttgcaaaaagaacaaaactgaaaaaacccagacacgctcgacttcctgtcttcctattgattgcagcttccaatttcgtcacacaacaaggtcctagcgacggctcacaggttttgtaacaagcaatcgaaggttctggaatggcgggaaagggtttagtaccacatgctatgatgcccactgtgatctccagagcaaagttcgttcgatcgtactgttactctctctctttcaaacagaattgtccgaatcgtgtgacaacaacagcctgttctcacacactcttttcttctaaccaagggggtggtttagtttagtagaacctcgtgaaacttacatttacatatatataaacttgcataaattggtcaatgcaagaaatacatatttggtcttttctaattcgtagtttttcaagttcttagatgctttctttttctcttttttacagatcatcaaggaagtaattatctactttttacaacaaatataaaaca

SEQ ID NO: 16 - DNA, 1999 bp, Saccharomyces cerevisia
aaacaaatggcaaaaataacgggcttcaccattgttcctgtatggtgtattagaacatagctgaaaatacttctgcctcaaaaaagtgttaaaaaaaagaggcattatatagaggtaaagcctacaggcgcaagataacacatcaccgctctcccccctctcatgaaaagtcatcgctaaagaggaacactgaaggttcccgtaggttgtctttggcacaaggtagtacatggtaaaaactcaggatggaataattcaaattcaccaatttcaacgtcccttgtttaaaaagaaaagaatttttctctttaaggtagcactaatgcattatcgatgatgtaaccattcacacaggttatttagcttttgatccttgaaccattaattaacccagaaatagaaattacccaagtggggctctccaacacaatgagaggaaaggtgactttttaagggggccagaccctgttaaaaacctttgatggctatgtaataatagtaaattaagtgcaaacatgtaagaaagattctcggtaacgaccatacaaatattgggcgtgtggcgtagtcggtagcgcgctcccttagcatgggagaggtctccggttcgattccggactcgtccaaattattttttactttccgcggtgccgagatgcagacgtggccaactgtgtctgccgtcgcaaaatgatttgaattttgcgtcgcgcacgtttctcacgtacataataagtattttcatacagttctagcaagacgaggtggtcaaaatagaagcgtcctatgttttacagtacaagacagtccatactgaaatgacaacgtacttgacttttcagtattttctttttctcacagtctggttatttttgaaagcgcacgaaatatatgtaggcaagcattttctgagtctgctgacctctaaaattaatgctattgtgcaccttagtaacccaaggcaggacagttaccttgcgtggtgttactatggccggaagcccgaaagagttatcgttactccgattattttgtacagctgatgggaccttgccgtcttcattttttttttttttcacctatagagccgggcagagctgcccggcttaactaagggccggaaaaaaaacggaaaaaagaaagccaagcgtgtagacgtagtataacagtatatctgacacgcacgtgatgaccacgtaatcgcatcgcccctcacctctcacctctcaccgctgactcagcttcactaaaaaggaaaatatatactctttcccaggcaaggtgacagcggtccccgtctcctccacaaaggcctctcctggggtttgagcaagtctaagtttacgtagcataaaaattctcggattgcgtcaaataataaaaaaagtaaccccacttctacttctacatcggaaaaacattccattcacatatcgtctttggcctatcttgttttgtcctcggtagatcaggtcagtacaaacgcaacacgaaagaacaaaaaaagaagaaaacagaaggccaagacagggtcaatgagactgttgtcctcctactgtccctatgtctctggccgatcacgcgccattgtccctcagaaacaaatcaaacacccacaccccgggcacccaaagtccccacccacaccaccaatacgtaaacggggcgccccctgcaggccctcctgcgcgcggcctcccgccttgcttctctccccttccttttctttttccagttttccctattttgtccctttttccgcacaacaagtatcagaatgggttcatcaaatctatccaacctaattcgcacgtagactggcttggtattggcagtttcgtagttatatatatactaccatgagtgaaactgttacgttaccttaaattctttctccctttaattttcttttatcttactctcctacataagacatcaagaaacaattgtatattgtacaccccccccctccacaaacacaaatattgataatataaag

SEQ ID NO: 17 - DNA, 2009 bp, Saccharomyces cerevisia
ggatgagaaacgagtgcggtttcgagagtagatattcaacccacccgaagtagccttcaggaactggttccgttctctcttcctccggaatagtctgaatgtccttaagagaccgtggctcgtatactcttctattcttgggccgcaatagcaaaaagagccagacaaacacgacggcggtaagaccgtagataatcagggttgaaatgaacgccgaagtcgaagaactgtcagccatagtacgtatgtgctataaatatctaacctttcgctgctttgaatatgatgtgctcaaatataacttaatataatagtataacaaaaaggagtactatttgctaaatatcgtagacgtagtagacatagtaaatacaataaaggatagataaccaagaacccacatcaagcgaatacatacatatatatatactcgatgtatacatgtttctaagcacttgcgcacatacgtatttaaagtatttcagggagattaacgtattaaaacaagaagagggttgactacatcacgatgagggggatcgaagaaatgatggtaaatgaaataggaaatcaaggagcatgaaggcaaaagacaaatataagggtcgaacgaaaaataaagtgaaaagtgttgatatgatgtatttggctttgcggcgccgaaaaaacgagtttacgcaattgcacaatcatgctgactctgtggcggacccgcgctcttgccggcccggcgataacgctgggcgtgaggctgtgcccggcggagttttttgcgcctgcattttccaaggtttaccctgcgctaaggggcgagattggagaagcaataagaatgccggttggggttgcgatgatgacgaccacgacaactggtgtcattatttaagttgccgaaagaacctgagtgcatttgcaacatgagtatactagaagaatgagccaagacttgcgagacgcgagtttgccggtggtgcgaacaatagagcgaccatgaccttgaaggtgagacgcgcataaccgctagagtactttgaagaggaaacagcaatagggttgctaccagtataaatagacaggtacatacaacactggaaatggttgtctgtttgagtacgctttcaattcatttgggtgtgcactttattatgttacaatatggaagggaactttacacttctcctatgcacatatattaattaaagtccaatgctagtagagaaggggggtaacacccctccgcgctcttttccgatttttttctaaaccgtggaatatttcggatatccttttgttgtttccgggtgtacaatatggacttcctcttttctggcaaccaaacccatacatcgggattcctataataccttcgttggtctccctaacatgtaggtggcggaggggagatatacaatagaacagataccagacaagacataatgggctaaacaagactacaccaattacactgcctcattgatggtggtacataacgaactaatactgtagccctagacttgatagccatcatcatatcgaagtttcactaccctttttccatttgccatctattgaagtaataataggcgcatgcaacttcttttctttttttttcttttctctctcccccgttgttgtctcaccatatccgcaatgacaaaaaaatgatggaagacactaaaggaaaaaattaacgacaaagacagcaccaacagatgtcgttgttccagagctgatgaggggtatctcgaagcacacgaaactttttccttccttcattcacgcacactactctctaatgagcaacggtatacggccttccttccagttacttgaatttgaaataaaaaaaagtttgctgtcttgctatcaagtataaatagacctgcaattattaatcttttgtttcctcgtcattgttctcgttccctttcttccttgtttctttttctgcacaatatttcaagctataccaagcatacaatcaactatctcatatacaatgtctatcc

SEQ ID NO: 18 - DNA, 1943 bp, Saccharomyces cerevisia
ggcagtcatcaggatcgtaggagataagcaccctgacaagtaacatgccgatgaagttgtttggttcattgggcaaaaaaatcgggattctagaaaaccctgagttgaagattttttcgacagttttatcgtctaggatggtatcggcactcattgtgaacacgttttcaatcggagtcatgatttcctcaaccctctttgcctttagatccaaaacagcagagatgattgtaacttcgtctttagtcaaccgttccacccccatggtcctatgcaaggtgaccaaagtctttaagccggattttttgtacatcgtaccatgatcttcacccagcatatagtccaggagagtcgcgatcggatatgcgactgggtacatcagatacatcagtacaagaacaaaggggcagaagaatgccccaacttgcagcccgtatttaacacagacactctgcggaataatttcaccgaagatcacaattagaatagttgacgacactacagcctgccaaccacccccaagacacctgtccaaaacaataggcaatgtttcgttggttataacattagaaagcagcagtgtgactagaacccaatgcttccccctagatattaggtcaagcacccgcttggccagtttcttttcagaattcgagcctgaagtgctgattaccttcaggtagacttcatcttgacccatcaaccccagcgtcaatcctgcaaatacaccacccagcagcactaggatgatagagataatatagtacgtggtaacgcttgcctcatcacctacgctatggccggaatcggcaacatccctagaattgagtacgtgtgatccggataacaacggcagtgaatatatcttcggtatcgtaaagatgtgatataagatgatgtatacccaatgaggagcgcctgatcgtgacctagaccttagtggcaaaaacgacatatctattatagtggggagagtttcgtgcaaataacagacgcagcagcaagtaactgtgacgatatcaactctttttttattatgtaataagcaaacaagcacgaatggggaaagcctatgtgcaatcaccaaggtcgtcccttttttcccatttgctaatttagaatttaaagaaaccaaaagaatgaagaaagaaaacaaatactagccctaaccctgacttcgtttctatgataataccctgctttaatgaacggtatgccctagggtatatctcactctgtacgttacaaactccggttattttatcggaacatccgagcacccgcgccttcctcaacccaggcaccgcccccaggtaaccgtgcgcgatgagctaatcctgagccatcacccaccccacccgttgatgacagcaattcgggagggcgaaaaataaaaactggagcaaggaattaccatcaccgtcaccatcaccatcatatcgccttagcctctagccatagccatcatgcaagcgtgtatcttctaagattcagtcatcatcattaccgagtttgttttccttcacatgatgaagaaggtttgagtatgctcgaaacaataagacgacgatggctctgccattgttatattacgcttttgcggcgaggtgccgatgggttgctgaggggaagagtgtttagcttacggacctattgccattgttattccgattaatctattgttcagcagctcttctctaccctgtcattctagtattttttttttttttttttggttttacttttttttcttcttgcctttttttcttgttactttttttctagttttttttccttccactaagctttttccttgatttatccttgggttcttctttctactcctttagattttttttttatatattaatttttaagtttatgtattttggtagattcaattctctttccctttccttttccttcgctccccttccttatca

SEQ ID NO: 19 - DNA, 2001 bp, Saccharomyces cerevisia
tgacaacgagtaccaggaaatcagtgcttctgctttgaagaaggctcgtaagggctgtgatggtttgaagaaaaaggcagtcaagcaaaaggaacaggagttgaagaaacaacaaaaagaggcagaaaatgctgccaagcaattgtctgctttgaatatcaccattaaggaggacgaatcgctaccagctgccattaagactagaatttatgactcttattccaaggtcggacaaagagttaaggtttccggttggatccatagattacgttctaacaagaaggttattttcgtcgtcctcagagacggatctggtttcattcaatgtgtcttgtccggtgatttggcattggctcaacaaactttggacctgactttggaatccaccgttactctgtacggtaccatagtcaaattgcctgagggtaaaaccgctccaggtggtgttgaattgaatgtcgactattacgaagttgtaggtttggcccccggtggtgaagactcctttacaaacaaaatcgcagagggctcagacccttctttactgttggaccaacgtcatttggccttgagaggagatgccttgtctgcagtcatgaaagtccgtgctgctctactgaaaagcgttagacgtgtttatgatgaagaacatttgacagaagttaccccaccatgtatggtgcaaactcaagtcgaaggtggttccactttgttcaagatgaactattacggcgaggaagcttacttgacccaaagttcccaattatatttagaaacctgtttggcctccctaggtgatgtttataccatccaagaatctttcagagctgaaaagtcccacacaagaagacatttgtccgaatatacccatatcgaagctgaattggccttcttgactttcgacgatctattacaacatattgaaactttgatcgtcaaatccgtgcaatacgttttggaagacccaattgctggcccactcgtaaaacaattgaatccaaactttaaggctccaaaggctccattcatgagattacagtacaaggatgccattacctggttgaacgaacacgacatcaagaacgaagagggcgaagactttaaatttggtgacgatattgcagaagctgctgaaagaaagatgaccgataccatcggcgtcccaatctttttgacgagattcccagtagaaatcaagtctttctacatgaagcgttgttctgacgacccccgcgtcactgaatccgtcgacgttttgatgccaaacgttggtgaaatcactggtggttctatgagaatcgacgacatggacgaactaatggcagggtttaagcgtgagggtattgataccgacgcctactactggttcattgaccaaagaaaatacggtacttgcccacatggtggttacggtatcggtaccgaacgtattttagcctggttgtgtgacagattcactgtcagagactgttccttgtatccacgtttcagcggtagatgtaagccatgatctttagttactgaagagtacgtgagcgctcacatatatacaaatatttataccgattaatatttacgttcctccctctctctaattattcattgatttattcaagaattagcgttataacaataaatggttggcgcaggcaattaatttttctttactcttccaaaccctctgttaacgacaatcaaataacctgatctgccaaggctccatcatatctggcctagaacagtttttttttttcgattatttgttcgttcttgtggtggttactcattggcagaatcccgaaaatcatgattagtagatgaatgactcactttttggataagctggcgcaaattgaaacatgtgaaaaaaaaaaaaaaggattataaaaggtcagcgaagcacagaactctgagataagactacctttctttagctaggggagaatattcgcaattgaagagctcaaaagcaggtaactatataacaagactaaggcaaac

SEQ ID NO: 20 - DNA, 1999 bp, Saccharomyces cerevisia
tcctaaggacatattccgttcgtacttgagttattggatctatgaaatcgctcgctatacaccagtcatgattttgtccctggtaataggggttttggttttattaattatattttttaatgacaacgaagcttgtgttttcaattctgcaatatttgcttttacttctcttgtaggtttgttaataatattaagtgatggtaatccaaagctagtcagtcgtcgaaattttaggaccgagcttttagtggatgtcatcacacgtaaaccggcggtagaagggaaagaatggaggatcatcacatacaacatgaaccaatatttgtttaatcatgggcaatggcatactccgtattacttttacagcgatgaggattgctaccgttattttctacgccttgttgagggagtaacccccaagaagcaaacagccacgtcaattggcaattctccggtcaccgctaagcctgaagatgccatcgagtcagcttctcctagttccagactgaattatcaaaactttttgctcaaggcagcggagatcgaacgacaagctcaggaaaattactggcgaaggcggcatcccaatatcgatgcgcttcttaaaaagacggaatagcttagagacactaccatacgtaaagcgaacataaactagagtatgatatataatcagcactaactggccggaaaacggccgaaggaagcctcgaaaagtcgattcgtgttggacccatttgctgaacaaagtggttcattgcctacctattatggtagtagtcgtgataatcgtgtggttggttttgtcaacggtgcatttgcattttcatgacaataaaccttgcgttttcgttctcgggatattactttccctccacttctttcgcctcaatagctcctataagcattctcagggcgtatgtcggtgatcgagatttccaagcaagcttttagtggaaatcatcgcgcgcaagccagcggtaaagggaaaagaacggaggacgattacatacaagatgaacgaataaataaattaataataaataataataaaaagtacagtagcattaaatattattaagtttaatgattaaaaattggttaattgtcaagaaaatctaaggtattaataaataaataatactatgacaacttgcagcgaaagcatcagccccaatgaaaattaatcagaattgaatctgagcgtatttatttgataacggtttacgtaactgttggaataaaaatcaactatcatctactaactagtgtttacgttactagtatattatcatatacggtgttagaagatgacgcaaatgatgagaaatagtcatcgttttcaacggaagctgaaatacaaggattgataatgtaataggatcaatgaatatcaacatataaaacgatgataataatatttatagaattgtgtagaattgcagattcccttttatggattcctaaatcctcgagaagaacttctagtatatctacgtacctaatattattgccttattaaaaatggaatcccaacaattatctcaaaattcccccaattctcatcagtaacaccccaccccgtattacttttaccgtgatgaagattggcatcgttactttctaaacgtaggacgtgcggaatgacaaaaccatcagcagtgtcacgatctctccagtcacaatggcaatcatgagtgcatagtccaaagtaaaggggcaaggaaaagcatgattgaaaggactccccatctggactctatatgtcatcagcggctaaaaaaaagcatatagcacaacatcagcatcagcatcagcactagagtcatcggcccggcggtccgcggtcatccccgcggactttccgtccgcccggcgggctgtatcagcgtcaactggaacgcgcatatatatacaagacacacataacatagaagcacacccacgacaataaccacacgacaataaccacacccgcccacccctcctttccgtatac

SEQ ID NO: 21 - DNA, 1500 bp, Zea mays
tgtcctattcatttataacttactaccccgcattacttacttgaaacctaaggattgactagctttacactttactttatccttgatgaccttatgggctgttatggttagcactctgctattgccttaacttaatcaatgaacatgatgtgactatttatgatactgttatcctgatgatgttgatgatcttgtgatactctagggggctcaggctgtttcctgagtacctctccgtaaggacttgttcgttgagagaccacccgggataacagtacaaccatgagggtgaaatgggatgcccttagctgattaattagatgaactagaggtgtagttgcttagccgtcgtgccgtcaatggggtccaggcacagtgcttgctctgccgaggctgagtgccgaggttctttcgttttgctctttgttagtcactctcctgcggggaggggtactgtgtttatcaaactggagaaacctaacgggcagctatggtctctagggaatctttgtaaaagctacgtagtgatgccctgccggaccacctaggtagtggtcaatggggattagctctccccgggtagaaagggaatcatgactcatgggtaaagtgtgcaacctctgcagagggtagtgaaactggtatatcagctgtgctcacggttaagagcagccttgggatcctctttgattagagatacagatggttcgagatacaaggattatgttatggttttggttcgactatgatgatgatgttcctcgatgaggaaatggtttacgggttgttaaatgctaaaatctggcttctactaatgataaatacctgaccaactaaaagcaactgcttgagcctaaccccacataaagctagtccacttcagccaaacgggacatttgctgagtacgttgatgtgtactcatccttgctttaccacaaaaacaccaggttgtccgcattgtaaccactgctcaggagaaggtgaagccgtggaaggagacttccaggagttccaagactacgacgaattctaggtgtgggttggcggcaacccccagtcagctacctgtgaaggccttatctttactgcgtttcgctagcactttgatttacctgttaagacaatgactatgtggatgtctatgactctgtgatgtaataagttaatactcttttatgttattattcgagcactgtgcgatgatgttcatttatgtaatcgctgtgtacgtgagttctgatcctggcacgtacatagttcgcattcggtttaccttccaaaaccgggtgtgacataagtggtatcaaagccaggttgactgtaggaccgctgacctagagtagcactggtcgtactaaggactattgacccttccctctcaccttgacctctgatgttacttcaaaagtcggtcacctcgcccaccctatgttttactacatatatatactatattataccttggaaaattttttatcttatcctggctatgggttatt

SEQ ID NO: 22 - DNA, 1708 bp, Zea mays
  misc_feature (914)..(914): n is a, c, g, or t
  misc_feature (973)..(973): n is a, c, g, or t
  misc_feature (1693)..(1693): n is a, c, g, or t
  misc_feature (1698)..(1698): n is a, c, g, or t
gctgtctgagaatacgcttgaattcgttctgtgatttttggcacagaggtaggttattacccatagatgccatcaaaaataacctctagtgcagaaccccaaccaaatgagggttgtagtacaaagtaaccatctacccttacttttgttatttttgccaagattatatcctaattattcttaacctcaaatttgtagcataaacaacagtgaccaatagcaaccaactgtaatttttacaacatttttgaaaatttttaaatcaatatagtagtacaagttccctttaaaagaacataaatagaaaataaaaaagggaattctggaaggaattaatattacataactagatctccctaagtgcccactaaaacactaagaggatgactaaattcttacttccactcaaaacctaaactaggtaagtataaagcactaagagcatcatacgataaagaaaccctagtttacccactgccttaatattgcttcaccatacatcgtatttactaaattggcatatcattaacatgcacgtatcttattcattgcattcaatagattgtaacctcgctgacggagagtacgtcctcattctagagcaaggagttgctcaagaaggagtccaggagccagcaccagagactgccactgaggatctccctgccccagcttttgaaggcaagccccagttttatgcataaccgttatatatgctattttactgcacttaatgattgtaggcttgtactgtgcacttaagtgtaggagttgccctaaaccatagttgcatgaactcaggatcccttgagatggatacgagtatgctaggtcgagtagctgctttactaattaggggatctcgtagaaatctagtgatttttctagcactcgcgcgaggtcaggaattggtngtatccatttttatatcataataatgatggtaggtggacacgatccatgaggatgcgtngtctacgggacggaaattgaataaaggattaaggtgtggtatcgtgtgtcaagcgtttgaacttactaaacacatgccgagaaatatggtaaatcggcaagcctagtacctgagtgaacctgcccgcaaattgaccttctcacgggacctgagatgtggtctcccattccggttatggtgggtacaagtgcggtcactgcacgacgacagtcggtgtcagtgatgcattgtacgccaaggcggtgagcctctttctgttgatggggaatcgatggggacggttgatgtgtgtggggacggagtgcctcgccacgtcgtgtgtttaggtttaccttgcaaggttaaaaactcgattcgaatcgtctgcttctcgcagctaatgagactgcttgatccatgctgctacattgagtgataagtgaaaatgaggtgactggtaaaagatgttgattgataaaatgtttgataccatgtatgattagctaggttctcatctagttttttgtaacacccagtttgtaatatataataaaagaggagaaaagttattttcctatattttatgtgtgttaaatctacttatcatcacatgtgaacaccatattcaaaaacaaataagtaataaaaaatatatgccattaaattatgcatcatgctggatattatttttgtgtgtgcattttgtgacaatataaaaataaagagacaagaagacgaatncctanatgtcaatcc

SEQ ID NO: 23 - DNA, 118 bp, Zea mays
ccacgtattttgcaagctatttaactggcggcgattgcgtacccgacgaccaaaattagggtcaacgctacctgtaggaagtgtccgcataaagtgcaccgcatggaaatgaagacgg

SEQ ID NO: 24 - DNA, 194 bp, Zea mays
ccccttacttgaggataaattatgtctaatattcaaactggcgccgagcgtatgccgcatgacctttcccatcttggcttccttgctggtcagattggtcgtcttattaccatttcaactactccggttatcgctggcgactccttcgagatggacgccgttggcgctctccgtctttctccattgcgtcgtgg

SEQ ID NO: 25 - DNA, 1176 bp, Zea mays
ccgatgataagcttgaattctggtcgtattatgttcttatgcggatgatgagagccaacttgctttcctgcttggcatgtgctacaaatcctgtctttctaaaatgaacatttgttagtcctaaaatgtgttctccctttagaagcttgtgaagattcttcatcccaacatgggctagtcggcggtgccagagccaacccatgttagtcttagcaattaagcaagtgtcgagttcagctctatcaaaatctaccaagtatagctgaccctctaacactcccttaaatgctattgaatcatcacttcttctaaagacagtaacacctacatcagtgaatagacagttgtagcccatttgacacaattgagatacggaaagcaaattgtaatctaaagaatctacaagaaaaacattggaaatagaatggtcaggagatatagcaattttacccaaacctttgaccaaaccttgatttccatccccgaatgtgatcgctctttggggattttggtttttctcatatgaggagaacatctttttctccccagtcatgtggtttgtgcacccgctgtcgagtatccaacttgagcccccggatgcataaacctacaaaacaagtttagttcttgactttaggtacccaaatggttttgggtcctttggcattagacacaagaactttgggtacccaaacacaagtctttgaccccttgtgtttgcccccaacatatttggcaactaatttgccggatttttttgttaaaacataagatgcatcaaaagttttaaatgaaatgctatgttcatttgatgcaataggaattttcttcttaggcaacttggcacgggttggttgcctagagctagatgtctcacttttatacataaaagcatggttagaaccagagtgagacttcctagaatgaattttcctaattttgtcctcgggataaccggcagggtataaaatgtaaccctcgttatcctgaggcatgggagccttgcccttaacaaaattggacaatcttttaggaggggcactaagtttgacattgtctcccctttggaagccaataccatccttaatgcccgggcgtctcccattatagagcatacttctagcaaatttaaatttttcattctctaaagaattcaagcgtattctcggagagtca

SEQ ID NO: 26 - DNA, 731 bp, Zea mays
cgtaccaccgcacgaagatttctattgttcctgaaggcatattcaaatcgttttcgttaccgcttgcaggcatcatgacagaacactacttcctataaacgctacacaggctcctgagattaataatgcggatctctacgataatgggagattttcccgactgtttcgttcgcttctcagtggataacagccagcttctctgtttaacagacaaaaacagcatatccactcagttccacatttccatataaaggccaaggcatttattctcaggataattgtttcagcatcgcaaccgcatcagactccggcatcgcaaactgcacccggtgccgggcagccacatccagcgcaaaaaccttcgtgtagacttccgttgaactgatggacttatgtcccatcaggctttgcagaactttcagcggtataccggcatacagcatgtgcatcgcataggaatggcggaacgtatgtggtgtgaccggaacagagaacgtcacaccgtcagcagcagcggcggcaaccgcctccccaatccaggtcctgaccgttctgtccgtcacttcccagatccgcgctttctctgtccttcctgtgcgacggttacgccgctccatgagcttatcgcgaataaatacctgtgacggaagatcacttcgcagaataaataaatcctggtgtccctgttgataccgggaagccctgggccaacttttggcgaaaatgagacg

SEQ ID NO: 27 - DNA, 1325 bp, Zea mays
  misc_feature (1148)..(1148): n is a, c, g, or t
tggctgtccgagaatacgcttgaattcttagaccagttttggattcacgaaggagcaaagtggcaaccgaaggccctctggtctgggagcaccggactgtccggtgtacaccggacagtgtccggtgcaccaccggacagtgtccggtgtaccagaggacttcaactcgaactcgccaccttcgggaatttccagaggcactcgcgctataattcaccggactgtccggtgtacaccggacagtgtccggtgcgccaaggaagatcagcctcaggaactcgccagcttcgggaaactccaacggctagtccgctataattcaccggactgtccggtgtgcaccggactgtccggtgcgactccagagcaacggctagtccacgccaacggctacctgcggcgcattaaatgcgcgcgcagcgcgcgcagaagtcaggcgcgcccatactggcacaccggacaaggaacagtagatgtccggtgtgcaccggacacccaggcgggcccacaagtcagaagctccaacggtcagaatccaacggcagtgatgacgtggcagggggcaccggactgtctggtgtgcaccggactgtccggtgcaccctctgccaggtggggccaggctggtccggggcagaggctttccctccgcagaaacccgagagcgcaggtttgggagttgaattttagtggtgcaccggacatcgcaccggactgcccggtgtgcaccggacagtgactgttcactgtccggtgtgccatgagtccaacggctagctgtcagaactagccgttggaaacgaccgttggcgcaccggtggcgcaccgttggcgcaccggtggcgcaccggactgtccggtgcgccattgcgcagtgaggtgcctgtaacggctagttggtgggtgagggctatttataccccttccacccaccatattcaatgtcttgcactccacatttattccagcacattgctagagcattgcaaccaccaaaagcctagtgaggagattagagaatcttaattcgcgtctgttcctcattagcgctagcgagagccacctagagcacacaccacttgcattaggcttctcttggtcaagcaaaagtctacggcttgttactcttggtgattggcatcacctanacggcttgttggcgttgggagctcggtgatcaccgtgaagatcttgttggtgacccgactcaagtttgtaagcggtcttgagggatccaccgggcccgaagtggcaaagatcatctcgtagtgagcccctggttcttgcgaggacaagggggaacgataccctggcccggtgcttca

SEQ ID NO: 28 - DNA, 77 bp, Zea mays
aacggggccgctttttcagaaaaccaagaccattaacggttttggggaaaaattccaccaacttgggaccgggaata

SEQ ID NO: 29 - DNA, 153 bp, Zea mays
gcgttcaatatcatcgcgatgttcttcgttatcgcgccagaccagcaatacctgcgcttctcccggctggcggttctcttccgctttgtgatgacgtcgccaccagcgtcgtgccgcgctctgtccaggcaggttttccagctcaaactggag

SEQ ID NO: 30 - DNA, 1424 bp, Zea mays
  misc_feature (1261)..(1261): n is a, c, g, or t
  misc_feature (1267)..(1267): n is a, c, g, or t
  misc_feature (1275)..(1276): n is a, c, g, or t
  misc_feature (1403)..(1403): n is a, c, g, or t
atgagcaattagagattcgtgccttggttcaccaagtcttgagccggttgtacatgtgttgtggctcctcccctttgcgaagccggaaccgactgagctccccctcgatcatttcccgcttggtgatctttgtaagctcatctccctcgtgcgcggttttgagcacatcccaaacctccttggcgctcttcaacccttgaactttgttatactcctctctacttaaagaggcgaggagtattgttgtcgcttgagagttgaagtgctcgatttgggctacctcatcctcatcatagtctttatcccctatagatggtacctgcgctccaaactcaacaacattccatatacttttgtggagtgaggttagatgaaatttcattaaatcactccacctagcataatcttcaccgtcaaaagttggcggtttgcctaatggaacggaaagtaatggagtatgtctagatgtacgagagtagtgtagggggatattactaaacttcttacgctcttggcgtttagaagttatggagggtgcatcggagtcggaggtcgatgttgatgaagtgtcggtctcgtagtagaccactttcctcatcctcttttgcttatctccacttcgatgtggcttgtgggaagaagatttttccttcttctctttgtggtgagaagaagatttcttctccttccctttgttggaggagatcttcttcttctccctcctcttggtgcgggactcttccgatgaagtgctcccgtggcttgtagtgggcttttcgccggtctccatctccttcttggcgtgatctcccgacatcacttcgagcggttaggctctaatgaagcaccgggctctgataccaattgaaagtcgcctagagggggggtgaatagggcgaaactgaaatttacaaatataaacacaactacaagccgggttagcgttagaaatataaacgagtccgcgagagagggcgcaaaaacaaatcgtaagcgaataagcaagtgagacacgtggatttgttttaccgaggttcggttctcgcaaacctactccccgttgaggaggccacaaaggccgggtctctttcaacccttccctctctcaaacggtccctcggaccgagtgagcttttcttcttctcaatcaaacgggaacaaaacttccccgcaagggccaccacacaattggtgcctcttgccttggttacaattgagttttgatcactagaacaagtgagaaagaaagaaagcgatccangcgcangagctcannagaccacggcaaatctctctcgctagtcactaaaagcttgagtgggattggagaggatttgatctctttggtgtgtctagaatttgatgctagagctcttgtagtagttgggaagtggaaaacttgnatgccatgatgttggggttgg

SEQ ID NO: 31 - DNA, 78 bp, Zea mays
tggctgtctgagattaagcttgattcgttgctctttcgctttaggcagagtcgtcttgatgatttcatgacgaaccag

SEQ ID NO: 32 - DNA, 1743 bp, Zea mays
ggagccagtgtacctatcggtaaggcacagcacccttctggttgttgtagtcgaatagcacaacgtcgacctccaccctaaatcgtagttatcaggagacggtgtacctgtcgctcaaggcgccacaccatcttggtgtggtagtcgggcagccaacgttgttctcaaacaagttttccacccccatcatctctcatcgaaagatcggacacccttcttgtgatagaccctcccaagtcattaggcccacctatagttgtccttgtccaacggacctcaaacaaccctgcaggtgcacctgatcacttgacaagttcggtatctgaattccttaccttttccaagagcgtttcacctatcacacagacattacaattcatcggagatacgaaagtgtggaagcagttacaataacttactttattgaaaagtaagacaaagttatatagttatagaccagaacaaaatatatgagtgcagagtattattattacataacatgggaggcaaaaacccctcccaaataaacagtaaaagttctcctaacggaggacctttcgtcccgcagctttagtcttgattctcttctttcggtaccaccttggaacagaagcaacaaaagtttgttgtttcttcacctaaaacaacatgggacaaagccctgagtatgaagtgtactttcgcaatacttacccgacaaagtaaaagactctcaaggatatgctggctttaagggagtcaaggtaaggcttatcaataatcaatgactctgttttgcagaaatgcttactaatagtggatccttaaaaatccagttttatttgtcaggttaagtaaaattacctgcaactagagttctttctatcctagttcaatcacttgacctatactagccaatttcttaacaacccttcttattcactggaatgctacgtgtaggtcagtgaccaagtcttcatgtccgcgaagttacggcgatccgaatcgattatactcagctgaggatctccaatcacacgacatatgtagcatttaacccttgcatatgtcaactcgccaccgaggttcttaagaccagatcaggttcaggccaaccgagagcatagatacaccaccgtccagcctcttgccacggagggtacacgctactctcgccatctctccactcccattgcgtgttatcttattctggtattagtctgcccgaggcaaagcttacccgtgacgaggcatgtgaccagttaaagggtcctcgatcatcaagcctacatcgagacggtccttaatcgactaagacggagacactccaccgagactctcttctcgtgcaagtcacccgcccggtctcagcttaatcatttcaaacccaaagtttggtacctggtagaggtacatattttccgatgttgaacccatcatggccatgatggatccaccatcaagttttattttcgaaaacattccacccactttgaagcatcatcttttgtaaaagcaaaatatttttatttttctagagcaaagctaagcataagaaaaaccatttgtaaaacagggacttaaggagaagtaatcaaatctaaggaacgtgttggggcgaaggcaaagacgctacccttcgcttgatgcccttgccgatctcgccgcaccaacggaggcgaagcgatcggcagttttcacccttcgtccaacacgctgcaagacgaaggcctacgacgaggtcgccccgtctcgcgtcctcgt

SEQ ID NO: 33 - DNA, 1528 bp, Zea mays
  misc_feature (1308)..(1308): n is a, c, g, or t
atgagcaattagaaattcgtagttatgaatttttcaagctctctacttatttaaaaagaataaatcttaaaggtttaagaaaaacagctttgcgccagggtccctgggttatttcttaactaaaacgttcaaaccgtgcccttgaggaactgtttcactgagtagtggacttcgcgaataccccctggcttttccctctcttaacccgagctccctcctcgccggaacagtagccgcagagagaaatagcggtggcgcggcttaccggtggtaggagaggtccggtggacggttgggtgaggttcggtggcttctagcggtcacgtcgaggggcggatcgccggcggtgatggccggagtagggctggccacgcgcgcaggcggtcgagctcgtcggcgacgcgtgatccggcctgctcacggcggtagagttcaatcaaaccgcacgaggagcttcatgggaggtcactcgtgctgtatgcacaaggaatcgaagagcggctcaccgtgtagctcggtctacgcgcgacggcggtcgggcgaagtccggcgacgtcaatccggcacctcctatgaggtggtgttcggtccaagggctcagggagcttcacttagctctagggaggctaggcgagggtttggatggggtggcggaggactggagcggccagtccatggtggccggggctagggcggccgctggcacgccgtgcgcagagcgattgccggtgaacttgtgctcgggcggggttgagagcgagcgggggtgtacggtcaaggccggggtcggctttataggcgtgggcactggcgtgggcatgtgtgggggacagatatcccccgggttcactggaaggataaaagacctcacaaaaggcccaagggcccaatagatcgtaaggtcactccttcatgggcctcgggaggaacaatcagtaaagcagattgacataaggccggatcggtgcaagcccggacggccccacaacgttgagcaagcaaccacaacagaagattcgactttctcgcgctggagccccgtacgacagaaccaggcgaagataagtcggcagaactataggaagatagactcaatcagttcactttctcttaggtgccgtttgttatctcatccgcatgtattgcctcacggtcgaatatataaggcctagggggcaccccttcaaattgatcgatcccattactcagccatccaccccaactctctacgttctagctttagagagctcccttgtaacccattacataaagcatactcgccaggacgtagggtgttacgcatctcanagcggcccgaacctgtaaacactgtccattgttcttcgtgcatctggcacgaaccatttagctatagtcggcgacaccgtcctactcctaaaacaccttgaggggcaaccccgggtgtgcggtcggacccaaaacatcgacagctggcgcgccaggtaggggggtgtgtcgccgatctaagctagctcaattgccgtcaccctttcacgcaagatcaccc

SEQ ID NO: 34 - DNA, 460 bp, Zea mays
ctgaacggtagagaaacgtacaaatactggggtgattttgttcggatctgagaggaaatccgctttggtaatatcgcttaagcttttatatggctggaaataaccgtgagcggctgatccgcgtgcatgaacaatacgttccggaatgcgctcatggtcaaagtgggtgattttctcgcgcagaataaaatcttccagcagcgttggaccacggctaccggcacgcagtgagttttgatcgtcggcgatgcgcacgccctgattagtggtcagcgcataattttcactgcctttgcgtacgtcttccagagaattaagtttttcgttacgcgtatcaggggctttcaggctccctggggcggtaggttgtgcacctggcggtgttggttcagccgctggacgatgagagccgtcctcaggtgccagtgagtccatccccggtttcgcttcgctggaatcg

SEQ ID NO: 35 - DNA, 234 bp, Zea mays
ccgtttgaatgttgacgggatgaacataataagcaatgacggcagcaataaactcaacaggagcaggaaagcgagggtatcctacaaagtccagcgtaccataaacgcaagcctcaacgcagcgacgagcacgagagcggtcagtagcaatccaaactttgttactcgtcagaaaatcgaaatcatcttcggttaaatccaaaacggcagaagcctgaatgagcttaatagagg

SEQ ID NO: 36 - DNA, 2303 bp, Zea mays
  misc_feature (876)..(876): n is a, c, g, or t
atgagcaattagaaattcgtaatttactgcaaagcacaacaaaatcgcaaagtcatcaaaaaaccgcaaagttgtttaaaataagagcaacactacaaaaggagataagaagagcacatacctcagtcacttattatcactagcgctcgccgcagccgtgtaaccgagcatagcgagcgaactggcgaggaagcaaagaagaactgttctgtcagatagctcttacgctcagcgcaagaagaaatatccaccgtgggaaaaactccaggtagaggtacacacgcggatagccaattcagagtaataaactgtgataatcaaccctcatcaatgatgacgaactaacccccgatatcaggtcacatgacgaagggaaagagaaggaaatcaactgtgacaaactgccctcaaatttggcttccttaaaaattacagttcaaaaagtatgagaaaatccatgcaggctgaaggaaacagcaaaactgtgacaaattaccctcagtaggtcagaacaaatgtgacgaaccaccctcaaatctgtgacagataaccctcagactatcctgtcgtcatggaagtgatatcgcggaaggaaaatacgatatgagtcgtctggcggcctttctttttctcaatgtatgagaggcgcattggagttctgctgttgatctcattaacacagacctgcaggaagcggcggcggaagtcaggcatacgctggtaactttgaggcagctggtaacgctctatgatccagtcgattttcagagagacgatgcctgagccatccggcttacgatactgacacagggattcgtataaacgcatggcatacggattggtgatttcttttgtttcactaagccgaaactgcgntaaccggttctgtaacccgataaagaagggaatgagatatgggttgatatgtacactgtaaagccctctggatggactgtgcgcacgtttgataaaccaaggaaaagattcatagcctttttcatcgccggcatcctcttcagggcgataaaaaaccacttccttccccgcgaaactcttcaatgcctgccgtatatccttactggcttccgcagaggtcaatccgaatatttcagcatatttagcaacatggatctcgcagataccgtcatgttcctgtagggtgccatcagattttctgatctggtcaacgaacagatacagcatacgtttttgatcccgggagagactatatgccgcctcagtgaggtcgtttgactggacgattcgcgggctatttttacgtttcttgtgattgataaccgctgtttccgccatgacagatccatgtgaagtgtgacaagtttttagattgtcacactaaataaaaaagagtcaataagcagggataactttgtgaaaaaacagcttcttctgagggcaatttgtcacagggttaagggcaatttgtcacagacaggactgtcatttgagggtgatttgtcacactgaaagggcaatttgtcacaacaccttctctagaaccagcatggataaaggcctacaaggcgctctaaaaaagaagatctaaaaactataaaaaaaataattataaaaatatccccgtggataagtggataaccccaagggaagttttttcaggcatcgtgtgtaagcagaatatataagtgctgttccctggtgcttcctcgctcactcgagggcttcgccctgtcgctcgactgcggcgagcactactggctgtaaaaggacagaccacatcatggttctgtgttcattaggttgttctgtccattgctgacataatccgctccacttcaacgtaacaccgcacgaagatttctattgttcctgaaggcatattcaaatcgttttcgttaccgcttgcaggcatcatgacagaacactacttcctataaacgctacacaggctcctgagattaataatgcggatctctacgataatgggagattttcccgactgtttcgttcgcttctcagtggataacagccagcttctctgtttaacagacaaaaacagcatatccactcagttccacatttccatataaaggccaaggcatttattctcaggataattgtttcagcatcgcaaccgcatcagactccggcatcgcaaactgcacccggtgccgggcagccacatccagcgcaaaaaccttcgtgtagacttccgttgaactgatggacttatgtcccatcaggctttgcagaactttcagcggtataccggcatacagcatgtgcatcgcatagaacgaatcaagcgtattctcgacagctca

SEQ ID NO: 37 - DNA, 1638 bp, Zea mays
catttagaaattcgtccaagtaaggggcaaggaaaagcatgattgaaaggactccccatctggactctatatgtcatcagcggctaaaaaaaagcatatagcacaacatcagcatcagcatcagcactagagtcatcggcccggcggtccgcggtcatccccgcggactttccgtccgcccggcgggctgtatcagcgtcaactggaacgcgcatatatatacaagacacacataacatagaagcacacccacgacaataaccacacgacaataaccacacccgcccacccctcctttccgtatacaaggcctcggtacctcttaaaaactttctctcaattctctctaccgtgatcaaggtaaatttctgtgttccttattctctcaaaatcttcgattttgttttcgttcgatcccaatttcgtatatgttctttggtttagattctgttaatcttagatcgaagacgattttctgggtttgatcgttagatatcatcttaattctcgattagggtttcatagatatcatccgatttgttcaaataatttgagttttgtcgaataattactcttcgatttgtgatttctatctagatctggtgttagtttctagtttgtgcgatcgaatttgtcgattaatctgagtttttctttttctttttgcaggtagagttaacgctagccttggtaccatacgtaagaaaatgattgaacaagatggattgcacgcaggttctccggccgcttgggtggagaggctattcggctatgactgggcacaacagacaatcggctgctctgatgccgccgtgttccggctgtcagcgcaggggcgcccggttctttttgtcaagaccgacctgtccggtgccctgaatgaactccaagacgaggcagcgcggctatcgtggctggccacgacgggcgttccttgcgcagctgtgctcgacgttgtcactgaagcgggaagggactggctgctattgggcgaagtgccggggcaggatctcctgtcatctcaccttgctcctgccgagaaagtatccatcatggctgatgcaatgcggcggctgcatacgcttgatccggctacctgcccattcgaccaccaagcgaaacatcgcatcgagcgagcacgtactcggatggaagccggtcttgtcgatcaggatgatctggacgaagagcatcaggggctcgcgccagccgaactgttcgccaggctcaaggcgcggatgcccgacggcgaggatctcgtcgtgacccatggcgatgcctgcttgccgaatatcatggtggaaaatggccgcttttctggattcatcgactgtggccggctgggtgtggcggaccgctatcaggacatagcgttggctacccgtgatattgctgaagagcttggcggcgaatgggctgaccgcttcctcgtgctttacggtatcgccgctcccgattcgcagcgcatcgccttctatcgccttcttgacgagttcttctgagcgggactctgggtacgtatgtcgacacaattgcagcgcttgagctctcctaggtccgcggacaaagctgggttttttttttttcaatttcgattcatctcaaggttaagaattcaagcgtattctcggacagcca

SEQ ID NO: 38 - DNA, 1869 bp, Zea mays
gaattcgtcatcccgggccccgctcagcttccacctaaccatgcatacccacaccaccaggaggtacaaatcgtacctcccccacccccgcctccacacccgcaacagccaaacatccaccaccccaaccacccccaagcaccaaaacaagaagacttcgccgatcagctgtatcgcagagtcattcacatgatcaccggggggtccagcatcgacttcgatacgaagcgacagaagagggaccactaccgcagcatcaaccacgttgccgtcaccggtccagtcgtgcagacaaagtggtccatgtgccattgaccttcgacgcccgagacgtcgacctgcgcagcgcaccccacatcgacgccatggttatcaactgcatcatggcaggctgggacctacacaaagtcttagttgacaacagcagccaggcggatatcattttcctccacgccttcgaccgcatgggcatcagccacagctttctcaaaccctcggacaacccactatatggcttcggcggcaagggcacctttcctgtcggcaaaatagagctacccctctccttcggtgtatcacccaatgcacgaagcgagaaagtcactttcgacatcgtcgacatggtgtacccatacaacgccataatgggtcgaggctccatcaacaagtttgaggcagccattcacagactttacctgtgcatgaagatcccgggtccgcaaggcgcgatcacagtctacgacaaccagcaggccgcacgcaacatagaaagagacttcgttcctgggcaaaggaacgtacactgcctcacggcgaagcgcgaggtccccgagtctgccagcccaaccgccaaagaccatgaaaaggcacagctgcagagcaacgatgggaccaagactgttcccctcgaccagacaacgcccaagcaaacagtcatcataagcgaagacctcacttcgcatgacgaggcgagactcctctcctgtctatccaaaaataaagacatcttcgcctggtccgccctcgacctggtcggagtcaatcgctctatcatcaagcacaacttgggatttgacccttcggtgaggccgaagaagtagcggctgcgcaagatgtctgatgagaagacagaagccgccaaggccgaggtacaccgcctacttgaggccaactttatcgagccagtcgcctaccctacatggctggccaatgtagtaatggtgtagaagaagagcggcaagtggcgaatgtgcattgatttcaatagcctcaacaaggcctgccccaaggacaacttcccgctgcctcggattgacaagatcgttgatagtgcagccgggtgcgaagtcatgtcactccttgattgcttctccggctaccaccaaatatatatgaaggaggaagacaaggccagcaccagtttcataacacccttcggcacgtattgcttcatcagaatgccggagggacttaagaacgctgggtccacattctctcggctcaccaaaatggtgctcgagagccaagtcggcagaaacatatttacgtatgtggacgacatcgtcgtcgccatcagaagcaaggaagaccatctggctgacctcgcagaaacgttcgcaaacatgcgggacgcacaacttcgcctaaaccccgaaaagtgtgtattcgacgttcgctagggtaaatactgggctacctggtgtcgcaccgcgggatcgaacccaatccgacaaaatccagccatcatcaacatgacgcccccgcatcagctaaaaacttcaacgactgaccagtaaatggcccgcctcaacagattattttcaagtccgaaagcgagcctactttcctaaaaacttcgtggcgaaaaaa

SEQ ID NO: 39 - DNA, 2133 bp, Zea mays
aatttggaaccaatgaggtattagtaaggacacaagaagatgcagatgagtggatagaaggaaagaggctcagaatgtaaggaaagcaccaaccacaacaccgtcgggacagacgagaaacatgggaagctccaccacaatcttgggttaagtgcaactttgatggggcatggccaacagaaggattaaaatgtggcttagggtgggtgcttcgcgatcatacagggaaggtgttatggttaggtgcacgagctgtggtaaaagtaagaagcgtgctggaagtagaagtggaggctcttagatgggctgtgctgtcattatcccgattcaattataggaagatcatttttgaggtggattctcagcaacttgtgtctttggttacatgaaagttatgcttgtcaagtctcaatccaattatccaagacataaagtatctacttagcaagtttgaggattttatgcttgtgcatacaagccgagaaggaaatggagtggcagatagaatagctaaggaatctctttcttttgagaattatgatctaaagttgtattctattgtaccaatttgggttaaaagctctgttgagctagactgtgtatccataaatgggtgaatggaaagtttgttgttgagcccaccggtggcgcgccataacttcgtatagcatacattatacgaagttatattcgatgcggccgcaaggggttcgcgtcagcgggtgttggcgggtgtcggggctggcttaactatgcggcatcagagcagattgtactgagagtgcaccatatgcggtgtgaaataccgcacagatgcgtaaggagaaaataccgcatcaggcgccattcgccattcagctgcgcaactgttgggaagggcgatcggtgcgggcctcttcgctattacgccagctggcgaaagggggatgtgctgcaaggcgattaagttgggtaacgccagggttttcccagtcacgacgttgtaaaacgacggccagtgaattgtaatacgactcactatagggcgaattcgagctcggtacccggggatccctttcggggtatccccctttcccggtccctgttgcaagagatagagaaagaggaaaacggaaaaggatacgaaatcggacgacgtggcgtaccttttctgacgcggttattacggcgaaggtgaagcgtcgcgcgctcctcccgtcagaggcgccgcctgtcccgccgcggagttaatgcgacggggcgagtggttggcggggcggccgttacgcgtgtgcgagccgtttcgaggaacggctgtgccgcttcgcgcttttcgaatcttgcgtccggtccaggcggcgtgctggaaacggtttcgccctggccttcatatacttgagagggggtccggtgacggttcttcgctctgctcccttcttttccctttaggttttcgcaacccgggaaactttagtcggaggagagagaaaccgcccttcctgccccccgcgccgccatcttctccatcttggtgatggcggatcgagtggctataatccccccgcgcgatccgtggcccttctccagggtaacggcgagtgatctggaggagctggtcggcgaaggtttgctccgccccctcaccgacaagcagcggctagagtggattcctcccgtgggcggagccgctccgtccccaccgccggggtatgtcgtgagcttcgtctccttccatgagcggggatttggtgtgccggcgggccgctttatgcgggccatcctattccactacggggtggagttgcacaacctctcccccaactccatctcgcaggccgctattttcgtagcgttatgcgaagggtacttggggatcgctcctcattgggatttgtggacttacttctttctcgccgagcctttcgccttgtcgacgggggagaggaggatccgtgcagcggtgcgggccggcggctgcattctcttgttgaggcagtcgcgggcgttgcagtacattcctgccattcttgcgtcttcgaacaaggggtggcagcgccggtggttctacctccggaatgacggtgagttgctcccaccgttttcccagcgagtagttacggctgccaccgaacgaatcaagcttatcatcggcca

SEQ ID NO: 40 - DNA, 1536 bp, Zea mays
gatgaccatttagaaattcgtctattcagcaatgacctaggtgcctaagggcacatgcgtccttaatccaagatgctgggtactcaggcacctataaataccctcgcacagtgcccttgagaggctagattaatagagcaattgccttcctgagctaaaaccttgtttgcattactttcactcccccgttggatcatcttgctcgggagagcaagttccaacatttggcgcccaccgttcgtgttacgaaaaaaccacccacgatggcacccaagagagctagctcgaaggcagccccatccgttgacgaagcagcgaaggcagcgctgttggccgagaaaaagggcaatgcccttgtcgacgccacccaccacgaagcctgcgaagacgacgcactcagcaagaggcagcgcaatgaacaacccacacccgaaggcagtctccgcacctgcagctccggaggacaaccgcaacctcccccaggcttcactccccggagggcgcggacgccactgaggatggcggagtcatcggtgtttcagcagaggaacaactacaactgcgggccttgcgcatcaagaaccgcaacctccagaagcaaaaggagatcctcaaggccaagcgccaacgtgtctctgcgcaggccaaggtgcgccagatgatacacgacgaggagcagaaggctcaggagcttgagcaagagattgcgctcatgcagagcgaaggccaacttggtctacaacaaggaccacccctccaacagcgtgcgccattcgaagacctgttcattcatcagcgtggacccatcccgcacgccacagcgttccaaggtgtcaactaccttgacgagcgaagtccactggcgccgcacctgcaagtgtcaccatggcccgccaacttcagggcggggatctaccccaagtacaacggcagcacagacccagcacaatatatcatgagctaccaagtcgtcgttgcatcatccggaggggacgacgccacgatggccaaatcattcatcatcgccctccaaggcccggctctcacttggtacaccaggttgcccccgttgttcatcgactcctggagaggtctgtgggacaaatttttgctcaacttccaagggtactgccagacaccgacgccttggctgaactgtcactctgcaagcagctggaaagacagactctgcgggagtactaccgcatgtttctgactctcaagtcgcaactgccttcggttgatgaccaaatcgccattcactacgccatcagtggccttcaggctggcgttctttacagccgctgcatcagagatccacccaagaacctccaggagctgtatcagctgttcgaaaaatatgccagatctgaagagctccaccagcgcaaagtcgagtcccagaggaaacccaaagaccctccgtagtctagccatacgtggatgagaccttcgcaagcagactccggtcgggatggccgcagtcagcagcaggtgcacaacatcgcacgaatcaagctgaatctcagacgctca

SEQ ID NO: 41 - DNA, 1614 bp, Zea mays
gaagataggcgattaatgaaagatcgtaggcgggtagaattggaaaagatgacaaggtggtgaaaacctagaatgcaaatttgaggggcaaaatggagaccggggaaatggtggaacattaaaaatataggacaccagcggaagggagccgtttcgggaattcttctgggcgatttttgaagaagggcgcccaatagggcaaattcaggagttaggaagttatcggcgggtttcttgcccggcaccaaattgcgaggaagggtgagcaaggtggttcccaaaacccccaccagggcgagcgagttgatggacatcgccaccaagttcgcctctggccaggaggcggtcgaggctatcttccgaaaggacaagcagccccagggtcgcccatcggaagaagctcccgaggcgtctgctccgcgcggcgccaagaagaaaggcaagaagaagtcgcaatcgaaacgcgacgccgctgacgcggaccttgtcgccgccgccgagtataagaaccctcggaagccccccggaggtgcaaacctcttcgacaagatgctcaaggagccgtgcccctaccatcaggggcccgtcaagcacaccctcgaggagtgcgttatgcttcggcgtcacttccacagggccgggccacccgccgagggtggcagggcccgcgacgaggacaagaacgaagatcacctagcaggagagttccccgaggtccgcgactgcttcatgatctatggagggcatgcggcgaatacctcggctcggcaccgcaagcaagagcgccgggaggtctgctcggtgaaggtggcggcgccagtctacctagactggtccgacaagcccatcactttcgaccaggccgaccaccccgatcatgtgccgagcccggggaaatacccgctcgtcgtcgaccccgttgtcggcgatgtcaggctcaccaaggtcctgatggatgggggcagctgcctcaacatcatctacgccgagaccctcaagctcctgcgcgtcgatctgtcctccgtctgagcaggcgctgcgcccttccacgggatcatccctgggaagcgcgtccagcccctcgggcgactcgacctccccgtctgcttcgggacaccctccaacttccgaagggagaccctgacgttcgaggtggtcgggttccgaggaacctaccacgccgtgctagggaggccatgctacgcgaagttcatggccgtccccaactacacctacttgaagctcaagatgtcgggccccaacggggtcatcaccgtcggccccacgtacaaacacgcgttcgaatgcgacgtggagtgcgtggagtacgccgaggccctcgccgagtccgaggccctcatcgtcgacctggagaacctctccaaggaggtgccagacgtgaagcgccatgccggcaacttcgagccagcggagacggtcaaggccgtccctctcgaccccagtggcgacaccaccaagcaggtccggattggttccgggcttgaccccaaataagaagcagtgctcgtcgactttttccgcgcaaacgccgacgttttgggccggatcccttcgactgccccggcttcccgaggaatgtccccaaaccttcct

SEQ ID NO: 42 - DNA, 2563 bp, Zea mays
  misc_feature (739)..(739): n is a, c, g, or t
tgtcgatgattacgcttgattcatcagaattggttaattggttgtaacactggcagagcattacgctgacttgacgggacggcggctttgttgaataaatcgatacggtccgagtttaaacactcgagaggccacgtgggccaacctgcaggaactagtgatatcacatttagggtcagtttttttggtcgacaaaacgaggaaagagaaacataacgtcagttttattggatgccttaaaccgacgttaaagtccatattatttgtagtgaatgttgacaactaggtgtgtaatagcggattctgacacatttggtctcacaaacagttaatgagctataatgtctccaaaaaccacaatcgtagcaaagcaaactgaagaagaagatacagcaaacaacaagtgtgaatagtacaagagaagagagacatgcaacgaaaattataaccaaaaacgaggttctacatattaaagacatcccatcttaaaagaagctgatatcccgcggacctaggagagctcaagcgctgcaattgcattcattttatgtttcaggttcagggggaggtgtgggaggttttttaaagcaagtaaaacctctacaaatgtggtatggctgattatgatcagttatctagatccggtggatcctacctttctcttcttttttggatctacctttctcttcttttttggatctacctttctcttcttttttggatcagctcgagatctcangaacaggtggtggcggccctcggtgcgctcgtactgctccacgatggtgtagtcctcgttgtgggaggtgatgtccagcttggcgtccacgtagtagtagccgggcagctgcacgggcttcttggccatgtagatggacttgaactccaccaggtagtggccgccgtccttcagcttcagggccttgtgggtctcgcccttcagcacgccgtcgcgggggtacaggcgctcggtggaggcctcccagcccatggtcttcttctgcatcacggggccgtcggaggggaagttcacgccgatgaacttcaccttgtagatgaagcagccgtcctgcagggaggagtcctgggtcacggtcgccacgccgccgtcctcgaagttcatcacgcgctcccacttgaagccctcggggaaggacagcttcttgtagtcggggatgtcggcggggtgcttcacgtacaccttggagccgtactggaactggggggacaggatgtcccaggcgaagggcagggggccgcccttggtcaccttcagcttcacggtgttgtggccctcgtaggggcggccctcgccctcgccctcgatctcgaactcgtggccgttcacggtgccctccatgcgcaccttgaagcgcatgaactcggtgatgacgttctcggaggaggccatggtggcgaccggtagcgctagctggtacctgttaactctacctgcaaaaagaaaaagaaaaactcagattaatcgacaaattcgatcgcacaaactagaaactaacaccagatctagatagaaatcacaaatcgaagagtaattattcgacaaaactcaaattatttgaacaaatcggatgatatctatgaaaccctaatcgagaattaagatgatatctaacgatcaaacccagaaaatcgtcttcgatctaagattaacagaatctaaaccaaagaacatatacgaaattgggatcgaacgaaaacaaaatcgaagattttgagagaataaggaacacagaaatttaccttgatcacggtagagagaattgagagaaagtttttaagattttgagaaattgaaatctgaattgtgaagaagaagagctctttgggtattgttttatagaagaagaagaagaaaagacgaggacgactaggtcacgagaaagctaaggcggtgaagcaatagctaataataaaatgacacgtgtattgagcgttgtttacacgcaaagttgtttttggctaattgccttatttttaggttgaggaaaagtatttgtgctttgagttgataaacacgactcgtgtgtgccggctgcaaccactttgacgccgtttattactgactcgtcgacaaccacaatttctaacggtcgtcataagatccagccgttgagatttaacgatcgttacgatttatatttttttagcattatcgttttattttttaaatatacggtggagctgaaaattggcaataattgaaccgtgggtcccactgcattgaagcgtatttcgtattttctagaattcttcgtgctttatttcttttcctttttgtttttttttgccatttatctaatgcaagtgggcttataaaatcagtgaatttcttggaaaagtaacttctttatcgtataacatattgtgaaattatccatttcttttattttttagtgttattggatattttggatgattattgatttgcataggataatgacttttgtatcagttggtgaacaagtctcgttaaaaaaggcagtgtttggtgactcgatttattcctgtaattaattcataataaatggatcttatttggggc

SEQ ID NO: 43 - DNA, 2753 bp, Zea mays
  misc_feature (2505)..(2505): n is a, c, g, or t
  misc_feature (2549)..(2549): n is a, c, g, or t
tcgagattacgcttgattcgtttgtgctattccggcttcacccgtaggtgacttttgcacggagtgtcgcacgcgagggtagttagcgctgcccctcgcgatgactttggtgtggtcgaatgccgaagaccatcgatgcggtctttttcgacattggcttagttttttgcgggggatttttgcttgtatattacatggcgccgcctcattaaaaacctcacccccctgggaggaaaagagtgcgggccggaataataatatttggtgaattacaagggcgtgatggccctgaggattcaaacaaaaaatttgcgaagattatctatattccaggaatgttccaggtcttcgccagattgtgttgtcagtccgtacgcgctgggagacgacttcgtcttgacgataaatggtccttcccactttggttccagcttaccccgtgactctgtccgggttgtgcggacaagtacgaggtccccttcgttgaattctcttgggacgactgcgtggtcgcgccaggccttcgtttgtgcttgatatttgtcgaggacctgcagggcgaagacacagtctccgtcaatgaggtctttggaagttggctcgtcgacgtcgggtactgctaaagcgcttgtccgcggggacccatgtttgattttttgcggtgtcatggcctccgatccagggggtgaaatcggtcgcccgacactcggtcgtgttcagtgcccagactgcttcaggtagcaggtcggcccatttgcgcttcttgtcgtcgaggagcattttcttgatcaccgtgaaaatcttgccattggcgcgctccacgacgccgttggattgtgggtggtacattgaggcgaaggcaagcttggtgccaatggagaagcagaaatccttgaagtcttggctgtcaaattgcttgccattatcgactgtgagctcggacgggactccgaatcgacaaacaatgttttgccagaagaatttctaggcagtcttcgatgttatcgtggatactgccctcgcctcgatccacttggtaaaatactcgacggtgatgaaggtgaacttgaggttcccttgggccgtgggtagtggcccgacaatgtctaggccccagcgctaaaggggccatgtgtgggcgattagctttgtgaattgcgaagggcttcccgagcgtggagaaaacttctggcaggcttcgcatgaccttgtgacacgatttgtggtgcagatcatggcgggccagtagaagccttgacggatcacctttgcagctagggccctaggccctgcgtgagagccccaagtcccgtttggacttccgcaggatttggacgctttcgttttggtgacacatttaagcatgggtggcctgattccttcttgtaaagctggccttcgatgagtgcgaagtcccggcttcggtgtttgaggcgctgggcttcgttgatgtcggttggatgatagtacccctgcaggaacagggttattggtgcccgccagtcttcgatcataatgaggttgactatgcggtggccctcgctgtcattggttatttggaggccctctgggctgcggacggctggcgtgccgatgacatggtagaatacgtcgaagggcagggcctcgcctctagcggctgccttggccaatgcgtcggcctcctcattcttggctcgatccacgtgctgcaaggtgaagcctttgaattgcctctcgagactgcggatagccgcgagatactgcatgagtgcggggtccttcgctgcgaaatatttctcgacttggccggcgactaccttggagtccgttctgatgatacaggtagtgacgccaagtgcccttagcttgcgaaggccgaggatgatagcttcgtattcttctatattgttggtgcatctgtcagactccaaagcaaagctgaggcgtgctgcatatttgtgcttgacccctgtgggtgaagtaatgactgcagctgcgcctgcccccgcatggcaccatgcgccgtcgcaatggatggtccacaccttctctgcggacgtgtccggctgcgttattggcccgatccagtcgacgatgaagtctgccaggacttgtgacttgatggttgtcctgggctctaaggtgatatggtagccggaaagctcggctgcccacttggcaatccgaacagatgcctccggatttttaaacaattcgccgagtcccctgtctaaggtgacccgtaccttgaacgcttcaaaataatggcgcaatttgcgtgaagccataacaactgcgtaggcgattttttccagttccgtcatgttgcattttgatgtcgtgagtacttcggagacataataaactggacattgcctgatcgtgccctctctgtcctgctcttgaaccagtgctgcgctgatcgcatgcggcgaagctgcgatgtagagcaataggggtagcgaggggttggggcttgtaagaatcgccaactctgacagatgctgctttaatgaagcgaangccgccgcttgctctggtccccatgcgaagtcttttacgcacgnagtgttttgagaaaaggtaggctcgctctgccgacttggagatgaatctgttgagggcggcccatctacctgtcagttcgtggacgtctctagctgactgcgggggcgtcattgtgatgatggcctggattttggtcggatgggctccaatccgcggtgccacaccagtaacccagtttttaccctaacgaacgtcgataccac

SEQ ID NO: 44 - DNA, 2816 bp, Zea mays
ggggccaaccccggggggttcttccctcccgaaatacgtgaaatttgctccccccggttttcccacggagtaagtaagggttgcccccaaacgccggggccatggggccccggcacgaaagccaaaaaattcccaagcccctttttccggccccgaaggaatttcggggagggggacttaccgctgcgggaatgaatgccgctatccaccgtcggagggtgctcccattggcggaccgccggctgccgctctgggagatgaccccggaaaactgactgggagggctcatgaatgtcccctgatcctctccccttcaacgccctccaatggcgggtgtcggccgcgatggggaagccggacccccacgcatattcccagcttcggatgcgccccgaccaggggtgcgtgactttggtgagcgtttgctcctcccttcttcgtatatctggtcgctccgggtccttatgatcgagttcttttctcccctccttttaggatgtggggtgtcacaaaccctccctgccacgggtcccggaggacgcggtggaccgtgcagcgcggcgggtcgccgcggaggagaagaagaaaaagaaggacgcggagaaggcccgggcccgcgagcggaggcgggctcgggacgccttggagaagcgccgccgccagcaggagcgggacggactcccgagggagccgtcgccggagacgcccgacgacgatgacgacgatgacgatgataatgatgacgacatggccgcccgtctcggccttagcctcggcccggggtgtggccaggagccgtcgagccagcccccgagcgagccgactccgtcagcccccgaagtcggggcgtcgggctcccgacccgaggcgcgggggcgaaccgagaggtcacctgacccctcagccggaggagctgaagtagttccggaggtccaggccaaggcgtctgttccccaggggccgccgcttgtgtcggtggcgcatgggggtgaccctcaggtcgtcgcggtcgtgcccggggaatctgcctcccaggcgccccaagcgccggtgaagcggacctcggcggccgttccgagagccaggatacaagaaggctctccccaggcgcggtggatcatggcccggagtgggtgagtacctcggaacgtcttcgtcttggcctcccattcgtatgtctcggttgtgatcccctttctttttcatccagcaagcgaagtcatggccagactgacctggcacctcggaaggccctcaagacggcgccgaactgtgcggccagcgccattcagccgaccctttcgcggggtactccgacatcgggggctcgggcgtcgccaatctcggaggagcaggctcccgaggccggctcttcagccgaagcggcgatcgtggttgaggaggcggctgacgcccacgcggctctgagttcgcctgtcgtgtcggtcatgccggcgcctgccaccgccgaggttgccgccgtccctgtcgaagggtgtccagttgccgccagcgccagggtggctgatgcgtcggcgcccgagacctcagaagaggtgggcgcggtcgcgcaatccgtccagccgggtgacagcctcatcgctgtgcggcggagccccgaggcccggcgcccattgctctgattccggacccgcgaggcctcggaccccgtcttcgttcttgatgatgagcaggaggaccagtcctggggtgagctccacgagtgcgcagaggcaacggtggggtcgctccgggcgtcgctggaggttttctgcagagacgtccccaaaatccttcaggtagcgatttcgggcatacctttttcccttctgtgagatactcgctgtgacgccctgtttcctttcccaggatctgacggaccggagcgccgccaagtcgtcgttcatccgccgtgaggttgatgtctggggctcgctgcgatccctgaggtcttcgcttgccggggctaccacgcgcctttctcagcaggatgccaaggtggcggacctccagctgctctgcgccgacctgagagccgaggcggcagcagcgcgtgcggaggcgcaacagcagcgatcggagctcgtccaggtcgtcgaggaatggaaccgacttcagggccgggctgccgaggccgaaagccgagccgagaccctcgaggctgacctagccgcgacccaggtcgcggcctcggagcaccgtgcccgagccggaagtacgtcttcgtcctccctagttctttttcttgtccgtttcccttgcttgtgcttgaggtatttctcctggctacttgcagagcttgagtccgccctcgacgagtccgccaaggcgcttgctgaggcgcttgccggagccgccgagcagagggaggcggacctcgcggccatgtccgaggccgtctcggacttttatcgtgtcctcggctccggcgacgtcccttcaggaagctcccctcagagccgccttcgagccttaggtggccacgcccgcggcagagtccgcgaagcgctacaccacggcgtcaggcgggccttcgccgtgctcgcttctcactacgttgtggacctggagcgggttagtgaggggtactgtcttcctgacgaggacgatgctgctctggcggaggtgcagcggcttgacgcggtcgccgcgggtccgagcgcggtgctggcgaccacctttgaggcggaggtccttcctcctgcgacgtcaccggaggccgagatggaccccaccgatggcgggggtggagctgaaggcgcggctccttcccaaggcggcgcctgatagaattcaagcgtattctcggacagcca

SEQ ID NO: 45 - DNA, 2997 bp, Zea mays
  misc_feature (918)..(918): n is a, c, g, or t
atgagcatttaggaattcgtcaaattaggaattagaataaaacaaaattttctgcaaagtataatatatataataaaacataaaattggtcgatatgaccaacctttgaagggataccaaagtcaaggtgataatagaggtctatagtccttagaacgaccatcctactctaggttagtggtcctacagtcagcacgactttgataccacctatgtcacacccggttttagaaggcaaaccgaatgcgaaccatgtacgtgcccaggatcagcaattcacgtacacaacaattacataactggacatcatcacacagtgctcaaataataacataaaagatagtaatagtcgattacatcatgatgtccgagacatccacattgtcattaatagttatcaaagtgcaagaaagaaacgtagatacacacagccttcacaagcagccgactgggggtttgccgctaacccacgcctagaactcatcgcactcttggaactcctggaagtcctcctccacgacttcatcttctcctgagcagtggttgcaacatggacaacctggggggctttggtgtgtaaagcaagggtgagtacacatcaacatactcagcaattgtcccgttttgctgtagtggactagctttatgtggggttaagccaagtagttgcttttagttggtcaggttattattactagtagagagccagattttagcattaacccaagttgttaacccaaaagtaccctttccaaatggaaaggataccagaaacattaccataagcataatcaaaaccatcatcctcgtcaccacctgtaaaccaaccatctctaatcaaagtatctctaatcaatggagctcccttgccactcataaccatgagcacaactgattaatcagtttaataacactcgnaaagagttgggcaccttacccacaagccgtgattccctcttgcctggggccgatcaaacctttaacactgccatggtgaataggcagggttttactacgtagcctttacaaagattccctgaggctatagccgcccattaggttttctaaatgtaccacactcctccccaaggggcaatccaccctcggtagagcgagccgcatacactgagccccattgacggcacgacggcgaagcgaactacaccccagttcctctaattattcagctaagggcgtcccataccaccctcatggttgcacttttttcccgggcggtcatccaacgaaccaatccttatggagaggcactcgagaaaccactcgagtccccttaaatgtcacagtatcatcatcataatcaaaaggaaaaatagcgtatgataaataatctcatcctgttcattgattaatgtgaagcactagcataaagctaaaccaaaataacccaaccaaataggtaaacaaggacaagataaacaaaagctagtcaatccttaggtataaattgtgtaaatgcggggagtgaattataatgtgagtaggacatagatgggtcaagggacacttgccttcaccaaccagctgctgctcagggtcttcacctacaactccttcagactctgccaactgaccgttatctataagagttcaaacatacattccacaaattcaatataaaagaacagtacaccatgcattaaaatagagtaaataagtagatactcggcgcagggctcgcacctacgactaagcgagaaagagaaagcaacggtcaaggctatggtcgatggacgatcacgttaagcgattatagattaaagtactcgtctaaacataatagtattaatttgacaatcacgttatgcataggataaagtcacgctacagtttaattattataaacaattcaaagtaaatttaaaaagattgttgcccagcgaaacgcacgacgacaaacgcaaacgaaacttagaataaaatgagtcgtcgcgcggcgaagcgcgcgacacaacacttagactaaaatgaacataaaacgaatcatcgcgtgacgaagcgcgccatgagacacttgaattaattatgaaaataacgtcaagcgtcgcgcgacgaagtgcacgacaggatatgtcacttaaaatgaaattaaaacaaaacgtcatgcgaccagacacgcaacgccacacattaaataatttaagatgaaccgtcgcgtgacaaagtgcgcgacgtagcactttaattaaactaaattcgaaactaattaaactgaaatttgatcaccgcgcgcgcggaaacgcgctgggcgagccacgaggggctgcgcgccgggtcggggtcgcgcgcactggagccgggacggccgcgcgcaagggccaggatggccgcgcaccaggggtcgggaacgaccgtgcgcaggggcgccgggacgaccgcgctcagggggctaggaacggccacaccgaggggcgccgggaacagccacacatagggggccagggcggccgcgcgcagggggccaaggtgccgcaccgctaggacacgcgggcggtgggaagagaaagggaagggagagggagagagagggggaggtgaggctcaccttgggatccaaaatccggcgataactgtcaccggatcacacctagggcacgaggtgggagagaggtggaagagagggagagggagttgctgtgcaggaaaaataaaatgagaggaagggagaggcgggcgcgcatgggggggtttggggcgccaggggcacgcgggggcgcgcagggccgggacaagctgggtcacgagccgggatagaagcccacaacgcacacgaccactgatcggaatccagttgcgaatcgaaatccaaaacgaggcgagatgaacgcgtgattaaacaaaacatcagacaaaataaaaatgctttggcatgatgcaacacccatgtcaacttaggtttttgtttacacgcgatacgtacaccagtcgctatactggtttaaaatggaagaacgaatcaagcgtattctcggacactca

SEQ ID NO: 46 - DNA, 2897 bp, Zea mays
tggctctccgagaatacgcttgaattcttatgctttagaggtcagcattatgtcaccgatattatgctttagaggtcagcatgtattttgtcttttgcggccgagttcgtgatccgcccatatcttgctaggtggtgcaatttatttgctctgtgactgattggacatttgatggacgttccctggctagtcttcatgtcgcttctgtcgttcagattttgtacttcaccggctatatttggctttcctttgatccttactgatatctcatttttgtcttgaggtattcattgcatgccctgcacggatgtgacagttttgaaaaatatactgataattcctgggcgtccctcccaatgggtgtgggcaagggacggcttggtacgctgagtgttttagccggctgcttctgagtagtaatgtgatgtgacggtgggtgtaatcatatcgcccgcgcggttgatctctgtcgtgatatttattgcaccgtcttaagtcgttgccgacttaagccgattgctccgttagcagggcatagtggtcacctcgagttaagtaagcgcgagcatgttgcaccgtcttaagtcattgccgacttaagccgattgctccgttagcagggcatagtggtcaccccgagttaagtaagaatgccggtcaatcgtgaacaaactgagtattcttgaagcccttttttattgatgacatatttcccattttacaaagtacattatcgtcccgatagcttttgaaatacaactagggataaaacttcctgaggtgttctatattccaggagttcccaattcctgtgtcgtccatttgagtgagacgatatgatcccggccgagtgacttctgctactatgaatggtccttcccatgagggcgacaacttgtgccgtccctcccccgttagaattcggcggaggacgagatctcccactgtaaaggatcgttgtcgcacggccttgtcgtgatagcatctcagagtctgctggtatcgtgctgattgaattactgcattcagccgttcttcttcgagtacatcaatgtcctccagcctagtagcttcggcttctgctatgctttcgaaaatcaaccttggcgccccaaacttgagatcagcgggtaatactgcctctgacccatagaccatgaagaaaggagtgtttccatgcagagctcggctaggttgggttcttaggctccaaacgacatagggcaattccctttatcattttcctgcgaacttttcattcttatcaaagacctttttcctgagtgcttcccatatcatcccgtttgctcgttcaacctgcccgttggctctggggtgtgctactgaagcatacttgatctgaatgcttttttgctcgcagaaatcgaagaactctgaaacttgtgaagttggatcctaaggtcagttatgatatggtttcggtatcccgaccctgaataataagttctgttatgaattccacgggccttagctgaggttaaagaagtgatgggtttgaactctatccatttagtgaatttgtcgattgctaccagtacatgagtgtatcctccttgagctttcttgaacggtccaatcatatccagtccccagcatgcgaagggccaagttactggtatggtctgcagctgttgtgctggtagatgttgttgctttgataagtactggcaagcctcgcacctttgaactaactgggctgcgtcactttttgctgttggccaatagaatcctgacctgaagaccttcccgactagtgtcttggatgctgcgtgtattccacattgcccagcatggatctcatctaaaagtcgcttcccagtagatgagagaatgcacttcatgaggacgcctgatgcaccccttctgtataatgtctccccaatgagtgtgtagtgagctgactgtctagcgatgcgctcggctgcatttttgtcatctggttcctcttcattctttatatatttgatgatcggccttctccagtcatcagagtctgactctggttgattcacgatattacactcttctgcctgatccattgagatgcttgattgtggtatttcttgtacaaagactccaggtgggacctcagttcgactggatcctagcttggacagtacatcggctgccgtgtttcgatctctttccacgtgatgaaattccagaccttcaaatttatcttctagttttcggacggcagtgcagtactttcccattgaatcgcttgaacaatcccattctttgtttatctggcttatgactaccaaagaatccccgtacaccatcagtctcttgatgcctagtgatatagcaatgttcagtccatgaattagggcttcatactcggctgcgttgttggaggctggaaatagcaactggagggcatatttgaggtgctcgcctccaggtgcggtgaagagaattcccgcgcctgctccctgcagcctcagcgagccatcaaaatacattcgccatacttctgcagtttctgggttatctggtacttgttgttcagtccattctgatacgaagtcaaccaacgcttgagttttgatggcagtgcgaggtcgaaattcgatgtcatgagatcccagttcacaggcccacttggctattcggccaatggcttccttgttgtgaggaatatccccaatcggaaaaccagtgactactatgactttgtggtcgtcaaagtagtgacatagcttgcgggcagttagaagtactgcatataatagctcctgaacttgaggatactttttctttgagggacccagaacttcactgatgaaataaacaggatgttgtactgggtaggcatgtccttcttctgctcgctcaaatacaacgaattcaagcttattctcagacagcca

SEQ ID NO: 47 - DNA, 2845 bp, Zea mays
tgagtgtccgagattaagcttgattcgttcgattcgccgtaaactgttgaaaaccagctgtaagtcttcgatgaagttttctgagttctccgttttgattaccacatcatctacataggcttccacacgcttgccccagtgatcggttaagcatgtttgaatggccctctgataagtcgctccagcgtttttgaggccaaacaacatggaggtatagcagaaagcaccgaacggagtgatgaacgctgttttttcctcatcttcccttgccaagctaatctgatgatatccggagtagcaatccagaaaagacagcacaaaacatccagcggtggagtctaccacctggtctatccttgggagcccgaagggatcctttggacaatttttgttgagatccgtatagtcgacgcacatgcgccaatccactttattctttttgattacaagaacagggttggctaaccactcgggatgtaacacctctctaataaacccagccgcgaccaagcgagccagcttagcgcgaatggcctctctcttgtcgggcgtgaagcgacgtagtttttgccgaatcggccttgcctgggggtagaccttcagtttgtgctcggccagttctctcgggactcccggcatatccgcaggttgccatgcgaatacgtctcggttatcttgcagaaactggacgagcgcgccttcctatttatcgcccaggctggagctgatgatggcaatcttgcgctcatcagcaaaccccaggttgatccttttagtttcttcagtcggtcgcatagaggtcgcggcttgagcttcattcgccggtgctgcaaggtcttcctcaggcttagagtttgcctgcgttgaagaagttgccgatggtttggtggtgagggccgcctggatggccactcggaaacattatgccgcgccttggaagtcagcgcgcacagttatgattccttgtggtcctagcatctttaatatcatgtacgtgtaatgcggaatggccatgaattttgccaatcccggcctcccgatgatggcgttgtacccgcagtcgaagttcgccacttcgaaccttaggaactcgattctgtagttatccggagttccgaaggtgacaggcatgtagatgtggcccagcgggtattccccttcagtcagcatgatgccgaagaaaggagtatctgacttgtggagctctttgaggtgaactcccaagccttggagtgtccgggggaaggtgacgttgatgctgctcccccccgtccactaacaccttcttcaccctgctctctcggatcaccagatcgacgaggaggggatatttgcctgggtggtcgaagttgagccattggtctgcccgagtgaaagtgatcgggtgctccgaccatcggtacggagcgggaggaccggtggtcgccaccaatatctggcgatcgttgagcttttgttgtcttctgttctcctgcgatccgtgtccgttgaagatgacgttgacctccctatcaacgcgtgggaaggctccacctcctccctcctcctgctgctagggttgtcgtggttcttctggtcctccccgcggcggaggaggaggtagaggttggaagggtcggccgtgtccgacggagtgcttgaagtccctgcagttccgaagggtgtggcgcatgtccttgtggtacgggcactgggcgtcgaggatgtcgtccagcgtgcgctcgcctccgcgaggtcctccccaggcgcgagaggcaggtggtccagcggcgtgcacttcttcgcgaggtctcttctcccagcgtttgtcgggttgctggttcgcgtcgcgtcgtggtgctgccggtgcgggcttcgctcccccgatgaggtcctgagctcgctcgtcggcggtgatgtagaggtcggcttcccggaacagctgctcggaggtagtcggcgccttctgcaatatggctcggacgaaggccgagtcattggatcctctgtagaagtcctcgatcacgaccgcctccgtaacctcggggatacgatttctcatggtctggaaccttttgaggtacgaccggagagtttcgtcccccggcgcttgatggatttgaggtcccatggttgcgctggtttgtcagagagggattgaaagttggcggtgaagcgtcgactgaagtcgcaccagtcgtcgatgcagtgtcggggtagatgtcgcagccattgaagtgcgtcttgcccgaggacaatgggtaagtatgtagtcatcacgtcctcggacgctccagcggctcgagcggtggtggtgtagacggccagccagccccctggatcctgcttaggttcatatttgtcgacattggataccttgaagttaggcggccattgaatggccctaaggcgtggagtaagggcagacactccacacgtatcttcctgtcgtcagggatgatgtctgtcccggggaggggagtagttgttgtggttcctcgactgtccccgggtagtaccgccagtcgaggtcgtcgttgactcggttctggtggcctgactccgagctgggatgccgtgatccctgtcgtactcctcccggcgactgatctcgttctcatgtcgtcgttcacgcgaagcattgatggagcttcgcgcgtcccggcgactgttgatggcgtgtcgtagatcgttcggtgggtgagcaagaggtagatggttggctgcttgggtgaacaatcgtcgatagccctcggcgtcgggagtccgagggagtccatcagctatccgagctagtaaccctccgacttcactcggcgtgttcaggctcgggcgaagtcgggaaacgaatcaagcttaatctcga

SEQ ID NO: 48 - DNA, 3308 bp, Zea mays
tgactctctgagaatacgcttgattcgtagctctggctccctctccctcctctctatttcttttgagcagagcactccattcctcccctttttgcccaaattccaaatcctgtgaaatcttgtgcaaccttgttgtgaaatgtgttcccctgtactccttgagtactcctgcaggttctcagctccttcgggagggttttcacaccttaaatggccatttctccgaaaccctaattcctcgccctccaagtgctcggtgaaatgcccaaactagccaaaaatgcttcaattgaacccaaatttttcaggcaccttcacaacacttccagcaatatacttgtcaaatttcacgccaatccgagtttccaggcttcaatttcactcaattctccgtttcgagcgatcgtttccgagccgagtgcccaaatctctttttcttcgcctaaattcaaaccaagcacacacttcactcatattcacctatataaacctattcatgaagtatcggctcaattccatgtcgtttcgtgcctcaattcgaattccaaacctcctatggcactatttatcgttcaaacatcgtttttcacgccgtttgacctatcgatcgtctcgtctcgtgttttctgtgccatatctctctgtgtgtgtatttatttacatttcatatacttatgactatgtgactaatacgtgctcacctcttttgtcatttcagtgaccttgattgcccgtgtgccgtctcctgtcctgcctggatcgtcacctctcgtgtgagctttccaggtagtcatctcatcttttgctaatctatcggtcattttcgctctgtgcttagtcactctctctcatttgcagacatcagttcaggatgccgcgcacgaagaatgtgtcggcgccagggggaggcgatgacgaggatcctcgtcgccccttcaggcaggtcaagggcaagaccgtttacttggagcagcaagaaggccgcaagaagcggcgtacagacagagcagcccgtgcagcggcagcggctacagcagccgcagcgcaggccgagcttggagatcagccgcagactccgtcagatcagatcgcataccgtgttcgtcgtctcgcctcccggcctcgctcctccactcacacctccgcttccactccgccacccactctgcctgctcccgtcactcctattgctccatccacctccacagccatacccgctacctccactacgccagcttccactgctcctcctcctcccgctcccgctttagctcctcctgtccctccacctcgattccgggagcgcgatgagactgaggttcgacccctggctacggatcctcgactgtttgaccttcagcgtgctacagcggcacgggtacgtaggttcagatacgtacctgtggagtcttggctaccagctcagagagaccctgcagcaggtgacctattcagcacacggattcaggagtcgtttttcagagctcagatgtctgctcagatagctctgcgagtgcaccggcttttggatcttccagcctttctgcttgcagccggtgctgactctcaggcgcacctcaaatatctgcctggccttctgacccttttgactaccagcggcaggtatgttgaggagtgggttcgagtcttctacgcctctgtatggatagacccggatcatcactggatgaggtttcgttttgagcgcgaggatgtcaccattactgccggtcagatccgccagctttttggatttcccgagtcgacgactcgtcttcacagcctctgctacggcacttctgatcctcctcgtcgccctcacggcggtgtggctccgggtacagctcacgtcgcggctctcttccgcccccccttctcagatgggtcgcgacgttcaccggcatattttactacagcagccaagtatttatatgagctgatcagacgaactcttctgccgaggatgggatacagggaggctaccacacatatacagctctggctccttggtgccctggtctctcactctaagtttgacgttgtggacttcctgatttttgagatcgaggacaccgttttggatgggatctgtgctcgtcggcagttgccctatgctcactacttgtgccacatctttgcgcagctgattcagcctcctcggtttcagggcacccttgaggcctcccgcctcgtttttggatcctaccgtcctgtgcctgagattcctgtgccagcttctgctcctgtttttgactcttaggccgaggatgcagctcttcgtcagttcgacactcaggttccagcagctgatgatgatgattttggggttcctcctccgcctccgcctcctatgcctccacgctcacatgatcctctagagtcgacctgcaggcatgcaagcttgagtattctatagtgtcacctaaatagcttggcgtaatcatggtcatagctgtttcctgtgtgaaattgttatccgctcacaattccacacaacatacgagccggaagcataaagtgtaaagcctggggtgcctaatgagtgagctaactcacattaattgcgttgcgctcactgcccgctttccagtcgggaaacctgtcgtgccagctgcattaatgaatcggccaacgcgaaccccttgcggccgcccgggccgtcgaccaattctcatgtttgacagcttatcatcgaatttctgccattcatccgcttattatcacttattcaggcgtagcaaccaggcgtttaagggcaccaataactgccttaaaaaaattacgccccgccctgccactcatcgcagtactgttgtaattcattaagcattctgccgacatggaagccatcacaaacggcatgatgaacctgaatcgccagcggcatcagcaccttgtcgccttgcgtataatatttgcccatggtgaaaacgggggcgaagaagttgtccatattggccacgtttaaatcaaaactggtgaaactcacccagggattggctgagacgaaaaacatattctcaataaaccctttagggaaataggccaggttttcaccgtaacacgccacatcttgcgaatatatgtgtagaaactgccggaaatcgtcgtggtattcactccagagcgatgaaaacgtttcagtttgctcatggaaaacggtgtaacaagggtgaacactatcccatatcaccagctcaccgtctttcattgccatacgaaattccggatgagcattcatcaggcgggcaagaatggaataaaggccggataaaactgtagaattcaagcttatcatcggacactca

SEQ ID NO: 49 - DNA, 4998 bp, Zea mays
tggctgtctgagattacgcttgaattctctgcaccgcaccgtgtccggtcagtcgagtcacctggagagactgcaccaccgcctgcgtgaggagcaggaacgccggcgccagcacagagagcagcagggctcttcttccccacctcaacgagaggtggagtccgcgaggccccgttcctctgtggcccagctggaggcgccccctgccccgccgcgggacgttccagctgttggaggagctactggaggagatcctggaggagaccccgacgacgacgactcagaccacagcacggagtcttctgagccgcaggaggcggaaggatgggtcgcccgacccatcacccgtgacgccgctcgcggttgtcacttccacgacgcactcgacaccttgctgcgccaggctttcgaccgacacacctggtcgatcgagtatcgttgtgtagtctaccagcacaatcgcgggaggtacccggaccgctgggaggctacctgcctagttcgccgtccggaggatgacctccggggtgcggaggccatttcggagcactattccatctccgagagggacactgcagaggcggctatgcaggatgcagcacgacgtgcactctctcagtactgttctttgttcggtggcgtggccgacggtcttaaccttcggtactacccccgccgccctactagcagcaccgagagtgtggttgtctcacccgttggtgaggctaaccctaggttgagcagcacagtcaacctagtcgcagtgcttaacactgagctggaccactctctggacgagctaagcagggctcgaacggagattgcggagttgcgtgctgagctggcagagcgccatcaccaggagggtggttctcccgctcctgttgggactcagcacccataccgctcaccgccacgtggtcaccacacttatggttcccctgtctgtaagaccaggatagatctggatccttagatcgttagcgtcgtagtttgtaataattcttaagtcagatgtctcagtcttaggtagtcagtttagtttgcttatcagttgcttccatttaggttagtttgcttatcagttgctttcatgcttgttatgatgaacttgtgctggattcgaatctttgtaatgactgttgccaacctgtgggtttctgaaagggaattaggcttacacctagtccctaattaattttggtggttgaattgcccaacacaaataattggactaactagtttgcccaagtgtatagattatacaggtgtaaaaggttcacactcagccaataaaaagaccaagttttggattcaacgaaggagcaaagtggcaaccgaaggccctctggtctgggagcaccggactgtccggtgtacacgggacagtgtccggtgcaccaccggacagtgtccggtgtaccagaggtgtcggggaccataattaggggtaccctcaagacgcctaattctcagctggtaacccccatcagcataaagctgcaaaggcctgatgggtacgattaagtcagggatcagtccacacgagtgactcgatcacgcttcacccgagcctagcctcggccaagggcagccgacctcgagagacttccgtctcgcccgaggccccctttttatggcggacacatcaccggctcgcccgaggccttggcttcgctcagaagcaaccttgactaaatcgccacaccgactgaccaaattgcaggggcatttaacgcaaaggtggcctgacaccttcatcctgacacgcgcccccggcagagccgaagtgaccgccgtcactccaccgctccactggccagtctgacagaaggacagcgccgcctgcgccactccgactgcagtgccactcgacagagtgagtctgacaggcagtcaggccttgccaaaggcaccacggcgaactccgccctgcccgaccccagggctcggactcgggctaagacccggaagacggagaactccgctccgcccgaccccagggctcggactcgggctaagacccggaagacggcgaactccgctccgcccaccctagggctcggactcgggctaagacccggaagacggcgaactccgctccgcccgaccctagggctcggactcaggctaagacccggaagacggcgaactccgctccgcccgaccccagggctcggactcgggctaagacccggaagacggcgaactccgctccgcccgaccccagggctcggactcgggctaagacccggaagacggcgaactccgctccgcccgaccccagggctcggactcgggctaagacccggaagacggcgaactccgctccgcccgaccccagggctcggactcgggctaagacccggaagacgacgaaactccgcttcgcccgaccccagggctcggactcgggctaagacccggaagacgacgaaactccgcctcgcccgaccccagggctcggactccgccctggcctcggccgaacgacttccgcctcgcccgaccccatggctcgggctcggccacggcaacggaaggcagactcaacctcggcttcggaggaacccccacgtcgccctgcctagggcacagaccgccacgccaacaggaagcgccatcatcatcctaccccgaatcgactcgggtcacggagaacaagaccggcgtcccatccggccagctccgccggaggggcaatgatggcgctccacaagctctatgacgacggcggcccccagctctcttacggaagcaggacgacgtcagcagggactcgaccgctccaacagctgtccctccgccaggctccgccgcacctccgacagccacgacatcacgccagcagggtgcccagatctctccggctgccacattggcatgtacctagggcgctagctctccctccgctagacacgtagcactctgctacaccccccattgtacacctggatcctctccttacgactataaaagggaggaccagggccttcttagagaaggttggccgcgcgggaccgaggacgggacaggcgctctcttggggccgctcgcttccctcacccgcgtggacgcttgtaacccccctactgcaagcgcacctgacctgggcgcgggacgaacacgaaggccgcgggacttccacctctctcacgctcgactccggccacctcgcctctccccccttcgcgctcgcccacgcgctcgacccatctgggctggggcacgcagcacactcactcgtcggcttagggacccccctgtctcgaaacgccgacagttggcgcgccaggtaggggcctgctgcgtgctgacgaacagctccccgtcaagctccagatgggcagtctccagcaacctctccggcccgggacggtgcttcgtttcgggactcttgagttcatgtccttcgacggcagctacgacatgatacttcttccaccgccgcgcgactacgacaatggcgaccgacaacccgcccgccggcggcggaatcgacgacgtcttccccgcgtggtggaagggcaacattcgggctcgctccgttctctcccccgccaacggaggaggaggcggggccgtcaaggccaggtgggaggccgcgcttcgtcggccgtcgagcgaatcgacgcccccgacgccccgacggaaggcacgccggacgtcgacctcgcgttcaagacggaggcaagcgccgtccccccgcggcacgctgaccccgagcaagaagacgacgccggcgcgctcgcggaaagcctgcaggacgtcgccctcgaaccagagttgacggtgcaaccagtccccgatgtgactacgtcgctcctcgtcgacaaaaaggtaccaactaactcccatcttgcgtcatttcgactcggcctcaacccgccaaacgacctcgttttggcgggcgctctcattgaggcgagtgcaaccccactgaggttccgtatgcggtcgccttgggaccgactgacggacgtctcgacctacgggccctctgggtccgaggaagatgacgatcccagcatcgcttgggatttctccggactcggcaaccccagtgccgtgcgggacttcatgaccgcatgtgactactgcctatccgactgttccgatggaagccgcagccttggcgacgagagctgcggcccaagccgcgaatgtttccacatcgagctaggggatccctccgaaggcaaccatcttggcatgccggaggacagtgatctccctaggccggtgcctcgcgccgacatcccacgggagctagctgtagtccccgctccggcggggggttacgacccacaactcgagcaagtccgcgaggcgcaggccaggctcaacgagggaacaggagcgcttgagccgatccgtcgggacgtcggacaagcatgggtgggccaacccctgcccggagaaatacgtcacttgccccaaggtctccagcaccgcgtcgccaacgatgtcaggatcaggccgccgcccgcatccagcggggttggtcagaacctggcaaccgcagcaatgctcatccgcgcgatgccggagccgtcaaccaccgagggtcggcgaatccagggagaactcaagaatctcctggaaggcgctgcggcccggcgggccgagagcactgcctcccgaaggcaaggttatccctcggaacctcatgccgcgacttcccgattcatgcgggaagcctcggtctacaccgggcgcacgcgcaacaccgcgcctgcggccccgggccacctcggcaacgagcaccatcgacgcgaccgtcgggctcacctcgacgaaagggtgcgccgaggctaccaccccaggcgtggggggcgctacgacagcggggaggatcggagtccctcgcccgaaccacccggtccgcaggccttcagtcgggccatccgacgggcgccattcccgacccggttccgacccccgactactatcacgaagtacttcgggggaaacgagaccggaactgtggctcgggga

SEQ ID NO: 50 - DNA, 8151 bp, Zea mays
tgagctgtcgagaataagcttgattcgttgtgaaactcacattcaattcaaacttgattcaaaataattatataagataacagaaaataaaaaaggaaaagcttaaccgggcctcagattcacacttggcccaccatgaaaacccctccgcgcggcccaacttgaatccccccccgcgcatgactcattgtcaggtggggccgtgttgttggtcgccgaggcgcgcgcgctcacgaccgcgtttcgccgcctggtgggacccccatgttggctgttccttcgaccttcagctcggtgtgtcggttgcaaccactcgccgaagattccgcgaatagctcgggattgacctgaccgattccgcgaataactttgaatgcaccccgaaatccgttttcggaatgggtgacgtgcggcaacgaaattgcgcgaaacaaccccaaacatgagttttggacctaaagtaatggattgggcatgttcgttgcgctaaatgaagaaatggttccggtggcaaaaactcgtgcttatatgcaccccgacacccgttttcggaatgggtgatgtgcggcaacgaaattgcgcgaaaccaccccaaacatgggttttggacctaaagtagtggattgggcatgttcgttgcgaaaaacgaagaaatgattccagtggcaaaaactcgtgcttttatgcaacccgacacccgttttcggaatgggtgacgtgcggcaacgaaattgcgcgaaaccaccccaaacatgagttttggacctaaagtagtttagtgggcatattttttgcgaaaaacgaagaaatggttccggtggccaaaacttgtgctttgaatgcaccccgaaatccgttttcggaatgggtgacgtgcggcaacgaaattgcgcgaaacaaccccaaacatgagttttggacctaaagtaatggattgggcatgttcgttgcgctaaatgaagaaatggttccggtggcaaaaactcgtgcttatatgcaccccgacacccgttttcggaatgggtgatgtgcggcaacaaaattgcgcgaaaccaccccaaacatgggttttggacctaaagtagtggattgggcatgttcgttgcgaaaaacgaagaaatgattccagtggcaaaaactcgtgcttttatgcaacccgacacccgttttcgaaatgggtgacgtgcggcaacgaaattgcgtgaaaccaccccaaacattagttttggacctaaagtagtgtattgggcatgttcgttgtgaaaaacgaagaaatggtttcggtggcaaaaacacgtccttttatgcaccccgacacccgttttcggaatgggtgacgtgctgcaacaaaattgcgtgaaaccaccccaaacatgagttttggaccttaagtagtggattgggcatgttcgttgcgaaaaaagaagaaatggttctggtggcaaaaactcgtgcttttatgcactcccgacacccgttttcggaatggttgacgtgcggcaacgaaattgcgcgaaaccacccaaaacatgagttttggacctaaagtagtttagtgggcatattttttgcgaaaaacgaagaaatggttccggtggccaaaacttgtgctttgaatgcaccccgaaatccgttttcggaatgggtgacgtgcggcaacgaaattgcgcgaaacaaccccaaacatgagttttggacctaaagtaatggattgggcatgttcgttgcgctaaatgaagaaatggttccggtggcaaaaacttgtgcttatatgcaccccgacacccgttttcggattgggtgatgtgcggcaacgaaattgcgggaaaccaccccaaacatgggttttggacctaaagtagtggattgggcatgttcgttgcgaaaaacgaagaaatgattccagtggcaaaaactcgtgcttttatgcaccccgacacccgttttcgaaatgggtgacgtgcggcaacgaaattgcgcgaaaccaccccaaacatgagttttggacctaaagtagtgtattgggcatgttcgttgcgaaaaacgaagaaatggttccggtggcaaaaactcgtgcttttatgcaccccgacacccgttttcggaatgggtgacgcgcggcaacgaaattgcgcgaaaccaccccaaatatgggttttggacctaaagtagtggattggacatgttcgttgcgaaaaacgaagaaatgattctggtggcaaaaactcatgcttttatgcaccccgacaccctttttcggaatgggtgacgtgcggcaacgaaattgcgcgaaaccaccccaaacatgagttttggacctaaagtactggattgggcatgttcgttgcgaaaaatgaagaaatggttccggtggcaaaaactcgtgcttatatgcaccccgacacccgttttcggaatgggtgacgtgcggcaacgaaattgcgcgaaaccaccccaaacatgggttttggacctaaagtagtggattgggcattttcgttgcgaaaaaagaagaaatggttctggtggcaaaaactcgtgcttttatgcacccccgacacccgtttttagaatgggtgacgtgcggcaacgaaattgcgcgaaaccaccccaaacatgggttttggacctaaagtagtggattgtgcatgttcgttgcgaaaaacgaagaaatggttctggtggcaaaaactcgtgcttttatgcaacccgacacccgttttcggaatgggtgacgtgcggcaacgaaattgcgcgaaaccaccacaaacatgagttttggacctaaagtagtggattgggcatgttcgttgcgaaaaatgaagaaatggttccggtggcaaaaactcgtgcttttatgcaccccgacacccgttttcggaatgggtgacgtgcggcaacgaaattaagcgaaaccaccccaaacatgggttttggacctaaagtagtggattgggcatgttcgttgcgaaaaacaaagaaatgattccagtggcaaaaactcgtgcttttatgcaccccgacacccgttttcgaaatgggtgacgtgcggcaacgaaattgcgcgaaaccaccccaaacatgcgttttggacctaaagtagtgtattgggcatgttcgttgcgaaaaacgaagaaatggttccggtggcaaaaactcgtgcattgtatgcaccccgacacccgttttcggaatgggtgacgtgcggcaacgaaattgcgcgaaaccaccccaaacatgggttttggacctaaagtagtggattgggcatgttcgttgcgaaaaacgaagaaatggttccggtggcaaaactcgtgcattgtatgcaccccgacacccgttttcggaatgggtgacgtgcggcaaccgaaattgcgcgaaaccaccccaaacatgagtttttggacctaaagtagtggattgggcatgttcgttgcgaaaaacaaagaaatgattccagtggcaaaaactcgtgcttttatgcaccccgacacccgttttcgaaatgggtgacgtgcggcaacgaaattgcgcgaaaccaccccaaacatgcgttttggacctaaagtagtgtattgggcatgttcgttgcgaaaaacgaagaaatggttccggtggcaaaaactcgtgcattgtatgcaccccgacacccgttttcggaatgggtgacgtgcggcaacgaaattgcgcgaaaccaccccaaacatgggttttggacctaaagtagtggattgggcatgttcgttgcgaaaaacgaagaaatgattctggtggcaaaaacacatgcttttatgcaccccgacaccctttttcggaatgggtgacgtgcggcaacgaaattgcgcgaaaccaccccaaacatgagttttggacctaaagtagtggattgggcatgttcgttgcgaaaaatgaagaaatggttccggtggcaaaaactcgtgcttatatgcaccccgacacccgttttcggaatgggtgacgtgcggcaacgaaattgcgcgaaaccaccccaaacatgggttttggacctaaagtagtggattgggcatgttcgttgcgaaaaacgaagaaatggttccggtggcaaaactcgtgcattgtatgcacccaacacccgttttcggaatgggtgacgtgcggcaacgaaattgcgcgaaaccaccccaaacatgagttttggacctaaagtaggggattgggcatgttcgttgcgaaaaatgaagaaatggttccggtggcaaaaactcgtggttttatgcaccccgacacccgttttcggaatgggtgacgcgcggcaacgaaattgcgcgaaaccacccaaaacatgagttttgggcctaaagtagtggattgggcatgttcgttgcgaaaaacaaagaaatggtttcggtggcaaaaactcgtgcattgtatgcaccccgacacccgttttcggaatgggtgacgtgcggcaacgaaattgcgcgaaaccaccccaaacatgggttttggacctaaagtagtggattgggcatgttcgttgcgaaaaacgaagaaatgattctggtggcaaaaactcatgcttttatgcaccccgacaccctttttcggaatgggtgacgtgcggcaacgaaattgcgcgaaaccaccccaaacatgagttttggacctaaagtagtggattgggcatgttcgttgcgaaaaatgaagaaatggttccggtggcaaaaactcgtgcttatatgcaccccgacacccgttttcggaatgggtgacatgcggcaacgaaattgcgcgaaaccaccccaaacatgggttttggacctaaagtagtggattgggcatgttcgttgcgaaaaacgaagaaatggttccggtggcaaaaactcgtgcttttaagcaccccgacacccgttttcgaaatgggtgacgtgcggcaacgaaattgcgcgaaaccaccccaaacattagttttggacctaaagtagtgtattgggcatgttcgttgcgaaaaacgaagaaatggtttcggtggcaaaaacacgtccttttatgcaccccgacacccgttttcggaatgggtgacgtgctgcaacaaaattgcgtgaaaccaccccaaacatgagttttggaccttaagtagtggattgggcatgttcgttgcgaaaaaagaagaaatggttctggtggcaaaaactcgtgcttttatgcactcccgacacccgttttcggaatggttgacgtgcggcaacgaaattgcgcgaaacaaccccaaacatgagttttggacctaaagtaatagattgggcatgttcgttgcgcaaaatgaagaaatggttccagtggaaaaaactcgtgcttatatgcaccccgacacccgttttcggaatgggtgatgtgcggcaacgaaattgcgcgaaaccaccccaaacatgggttttggacctaaagtagtggattgggcatgttcgttgcaaaaacgaagaaatggtttcggtggcaaaaactcgtgaattgtatgcaccccgacacccgttttcggaataggtgacgtgtggcaacgaaattgcgcgaaaccaccccaaacatgagtttttgacctaaagtagtgtattgggcatgttcgttgcgaaaaatgaagaaatggttccggtggcaaaaactcgtgcttttatgcaccgcgatacccgttttcggaatggatgacgtgcggcaacgaaattgcgcgaaaccaccccaaacatgggttttggacctaaagtagtggattgggcatgttcgttgcgaaaaacgaagaaatgattccagtggcaaaaactcgtgcttttatgcaacccgacacccgttttcggaatgggtgacgtgcggcaacgaaattgcgcgaaaccaccccaaacatgagttttggacctaaagtagtggattgggcatgttcgttgcgaaaaatgaagaaatggttctggtggcaaaaactcgtgcttttatgcaccccgacacccgttttcggaatgggtgacgtgcggcaacgaaattaagcgaaaccaccccaaacatgggttttggacctaaagtagtggattgggcatgttcgttgcgaaaaacaaagaaatgattccagtggcaaaaactcgtgcttttatgcaccccgacacccgttttcgaaatgggtgacgtgcggcaacgaaattgcgcgaaaccaccccaaacatgaggtttggacctaaagtagtgtattgggcatgttcgttgcgaaaaacgaagaaatggttccgatggcaaaaactcgtgcttttatgcaccccaacacccgttttcggaatgggtgacgcgcggcaacgaaattgcgcgaaaccacccaaaacatgagttttgggcctaaagtagtggattgggcatgttcgttgcgaaaaacaaagaaatggtttcggtggcaaaaactcgtgcattgtatgcaccccgacacccgttttcggaatgggtgacgtgcagcaacgaaattgcgcgaaaccaccccaaacatgggttttggacctaaagtagtggattgggcatgttcgttgcgaaaaacgaagaaatgattctggtggcaaaaactcatgcttttaagcaccccgacaccctttttcggaatgggtgacgtgcggcaacgaaattgcgcgaaaccaccccaaacatgagttttggacctaaagtagtggattgggcatgttcgttgcgaaaaatgaagaaatggttccggtggcaaaaactcgtgcttatatgcaccccgacacccgttttcggaatgggtgacgtgcggcaacgaaattgcgcgaaaccaccccaaacatgggttttggacctaaagtagtggattgggcatgttcgttgcgaaaaacgaagaaatggttccggtggcaaaaactcgtgcttttaagcaccccgacacccgttttcgaaatgggtgacgtgcggcaacgaaattgcgcgaaaccaccccaaacattagttttggacctaaagtagtgtattgggcatgttcgttgcgaaaaacgaagaaatggtttcggtggcaaaaactcgtgaattgtatgcaccccgacacccgttttcggaataggtgacgtgtggcaacgaaattgcgcgaaaccaccccaaacatgagttttgacctaaagtagtgtattgggcatgttcgttgcgaaaaatgaagaaatggttccggtggcaaaaactcgtgcttttatgcaccccgatacccgttttcggaatggatgacgtgcggcaacgaaattgcgcgaaaccaccccaaacatgggttttggacctaaagtagtggattgggcatgttcgttgcgaaaaacgaagaaatgattccagtggcaaaaactcgtgcttttatgcaacccgacacccgttttcggaatgggtgacgtgcggcaacgaaattgcgcgaaaccaccacaaacatgagttttggaccaaaagtagtggattgggcatgttcgttgcgaaaaacaaataaatggttccggtggcaaaaactcgtgcttttatgcacccccgacacccgtttttggaatgggtgacgtgcggcgacgaaattgcacgaaaccaccccaaacatgagttttggacctaaagtagtgtattgggactgttcgttgcgaaaaacgaagaaagggttccggtggcaaaaactcgtgcttttatgcaccccgacacccgatttcggaatgggtgacgtgcgacaacgaaattgcgcgaaaccacccaaaacatgagttttggacctaaagtagtggattgggcatgttcgttgcgaaaaacaaagaaatggtttcggtggcaaaaactcgtgcattgtatgcaccccgacacccgttttcggaatgggtgacgtgcggcaacgaaattgcgtgaaaccaccccaaacatgagttttggacctaaagcagtggattgggcatgttcgttgtgaaaaatgaagaaatggttccggtggcaaaactcgtgcttttatgcacctcgacacccgttttcggaatgggtgatgtgcggcaacgaaattgtgcgaaaccacccccgaacatgggttttggacttaaagtagtgcattgggcatgttcgttgtgaaaaacgaagaaatgattccagggcaaaaactaagaattcaagcttattctcagacac

SEQ ID NO: 51 - DNA, 10813 bp, Zea mays
gactctccgagaataagcttgattcgttaacgaacatgcccaatacactactttaggtcaaaaactcatgtttggggtggtttcgcgcaatttcgttgccacacgtcacctattccgaaaacgggtgtcggggtgcatacaattcacgagtttttgccaccgaaaccatttcttcgtttttcgcaacgaacatgcccaatacactactttaggtccaaaactaatgtttggggtggtttcgcgcaatttcgttgccgcacgtcacccatttcgaaaacgggtgtcggggtgcttaaaagcacgagtttttgccaccggaaccacttcttcgtttttcgcaacgaacatgcccaatccactactttaggtccaaaacccatgtttggggtggtttcgcgcaatttcgttgccgcacgtcacccattccgaaaacgggtgtcggggtgcatataagcacgagtttttgccaccggaaccatttcttcatttttcgcaacgaacatgcccaatccactactttaggtccaaaactcatgtttggggtggtttcgcgcaatttcgttgccgcacgtcacccattccgaaaaagggtgtcggggtgcataaaagcatgagtttttgccaccagaatcatttcttcgtttttcgcaacgaacatgcccaatccactactttaggtccaaaacccatatttggggtggtttcgcgcaatttcgttgccgcacgtcacccattccgaaaacgggtgtcggggtgcatacaatgcacgagtttttgccaccggaaccatttcttcgtttttcgcaacgaacatgcccaatacactactttaggtccaaaactcatgtttggggtggtttcgcgcaatttcgttgccgcacgtcacccatttcgaaaacgggtgtcggggtgcataaaagcacgagtttttgccactggaatcatttctttgtttttcgcaacgaacatgcccaatccactactttaggtccaaaacccatgtttggggtggtttcgcttaatttcgttgccgcacgtcacccattccgaaaacgggtgtcggggtgcataaaagcacgagtttttgccaccgggacccatttcttcatttttcgcaacgaacatgcccaatccactactttaggtccaaaactcatgtttgtggtggtttcgcgcaatttcgttgccgcacgtcacccattccgaaaacgggtgtcgggttgcataaaagcacgagtttttgccactggaatcatttcttcgtttttcgcaacgaacatgcccaatccactactttaggtccaaaacccatgtttggggtggtttcgcgcaatttcgttgccgcacgtcatccattccgaaaacgggtatcggggtgcataaaagcacgagtttttgccaccggaaccatttcttcatttttcgcaacgaacatgcccaatacactactttaggtcaaaaactcatgtttggggtggtttcgcgcaatttcgttgccacacgtcacctattccgaaaacgggtgtcggggtgcatacaattcacgagtttttgccaccgaaaccatttcttcgtttttcgcaacgaacatgcccaatacactactttaggtccaaaactaatgtttggggtggtttcgcgcaatttcgttgccgcacgtcacccatttcgaaaacgggtgtcggggtgcttaaaagcacgagtttttgccaccggaaccacttcttcgtttttcgcaacgaacatgcccaatccactactttaggtccaaaacccatgtttggggtggtttcgcgcaatttcgttgccgcacgtcacccattccgaaaacgggtgtcggggtgcatataagcacgagtttttgccaccggaaccatttcttcatttttcacaacgaacatgcccaatccactgctttaggtccaaaactcatgtttggggtggtttcacgcaatttcgttgccgcacgtcacccattccgaaaacgggtgtcggggtgcatacaatgcacgagtttttgccaccgaaaccatttctttgtttttcgcaacgaacatgcccaatccactactttaggtccaaaactcatgttttgggtggtttcgcgcaatttcgttgccgcacgtcacccattccgaaaacgggtgtcggggtgcataaaagcacgagtttttgccaccagaaccatttcttcgtttttcgcaacgaacatgcccaatacactacttaaggtccaaaactcatgtttggggtggtttcgcgcaatttcgttgccgcacgtcatccattccgaaaacggatgccggggtgcatacaatgcacgagtttttgccactggaaccatttctttctttttcgcaacgaacatgcccaatccactactttaggtccaaaacccatgtttggggtggtttcgcgcaatttcgttgccgcacgtcacccattccaaaaacgggtgtcggggtgcagaaaagcacgggtttttgccaccggaaccatttcttcgtttttcgcaacgaacatgccaaatacactactttaggtccaaaactcatgtttggggtggtttcgcgcaatttcgttgcagcacgtcacccatttcaaaaacgggtgtggtgcataaaagcacgagtttttgccaccggaaccatttcttcgtttttcgcaacgaacatgcccaatccactagtttaggtccaaaaccaatgtttggggtggtttcgcgcaatttcgttgccgcacgtcacccattccgaaaacgggtgtcggggtgcataaaagcacgagtttttgccaccggaaccatttcttcatttttcgcaacgaacatgcacaatccactactttaggtccaaaactcatgtttggggtggtttcgcgcaatttcgttgccgcacgtcacccattccgaaaacgggtgtcggggtgcataaaagcacgagtttttgccaccggaaccatttcatcatttttcgcaacgaacatgcccaatacactactttaggtctaaaactcatgtttggggtggtttcgcacaatttcgttgtcgcacgtcacccatttcgaaaacgggtgtcggggtgcataaaagcacgagtttttgccaccagaaccatttcttcgtttttcgcaacgaacatgcccaatacactactttaggtccaaaactcatgtgttggggtggtttcgcgcaatttcgttgccgcacgtcacccattccgaaaacgggtgtcgggtgcatacaatgcacgagtttttgccaccgataccatttctttgtttttcgcaacgaacatgcccaatccactactttaggtccaaaactcatgttttgggtggtttcgcgcaatttcgttaccgcacgtcacccattccgaaaacgggtgtcggggtgcataaaagcacgagtttttgccacgggaaccatttcttcatttttcgcaacgaacatgcccaatccactactttaggtccaaaactcatgtttggggttgtttcgcgcaatttcgttgccgcacgtcacacattccgaaaacgggtgtcggggtgcataaaagcacgagtttttgccaccggaaccatttcttcatttttcacaacgaacatgcccaatccactgctttaggtccaaaactcatgtttggggtggtttcacgcaatttcgttgccgcacatcacccattccgaaaacgggtgtcgaggtgcataaaagcacgagttttgccaccggaaccatttcttcatttttcacaacgaacatgcccaatccactgctttaggtccaaaactcatgtttggggtggtttcacgcaatttcgttgccgcacgtcacccattccgaaaacgggtgtcggggtgcatacaatgcacgagtttttgccaccgaaaccatttctttgtttttcgcaacgaacatgcccaatccactactttaggtccaaaactcatgttttgggtggtttcgcgcaatttcgttgtcgcacgtcacccattccgaaatcgggtgtcggggtgcataaaagcacgagtttttgccaccggaaccctttcttcgtttttcgcaacgaacagtcccaatacactactttaggtccaaaactcatgtttggggtggtttcgtgcaatttcgtcgccgcacgtcacccattccaaaaacgggtgtcgggggtgcataaaagcacgagtttttgccaccggaaccatttatttgtttttcgcaacgaacatgcccaatccactacttttggtccaaaacccatgtttggggtggtttcgcgcaatttcgttgccgcacgtcacccattccgaaaacgggtgtcggggtgcataaaagcacgagtttttgccaccagaaccatttcttcgtttttcgcaacgaacatgcccaatacactactttaggtccaaaactcatgtgttggggtggtttcgcgcaatttcgttgccgcacgtcacccattccgaaaacgggtgtcggggtgcattcaaagcacaagtttttgccaccggaaccatttcttcgtttttcgcaacaaacatgccgactaaactactttaggtccaaaactcaagttttgggtggtttcgcgcaatttcgttgccgcacgtcacccattccgaaaacgggtgtcggggtgcataacaacacgagtttttgccaccggaaccatttcttcatttttcgcaacgaacatgcccaatccactactttaggtccaaaactcatgtttggggtggtttcgcgcaatttcgttgctgcacgtcacccattccgaaaacgggtgtcgggtgcatacaatgcacgagtttttgccaccgaaaccatttctttgtttttcgcaacgaacatgaccaatccactactttaggtccaaaactcatgttttgtatggtttcgcgcaatttcgttgccgcacgtcacccataccgaaaacgggtgtcggggtgcataaaagcaagagtttttgccaccggaaccattttttcatttttcgcaacgaacatgcccactaaactactttaggtccaaaactcatgtttggggtggtttcgcgcaatttcgttgtcgcacgtcacccattccgaaatcgggtgtcggggtgcataaaagcacgagtttttgccaccggaaccctttcttcgtttttcgcaacgaacagtcccaatacactactttaggtccaaaactcatgtttggggtggtttcgtgcaatttcgtcgccgcacgtcacccattccaaaaacgggtgtcgggggtgcataaaagcacgagtttttgccaccggaaccatttatttgtttttcgcaacgaacatgcccaatccactacttttggtccaaaacccatgtttggggtggtttcgcgcaatttcgttgccgcacgtcacccattccgaaaacgggtgtcggggtgcataaaagcacgagtttttgccaccagaaccatttcttcgtttttcgcaacgaacatgcccaatacactactttaggtccaaaactcatgtgttggggtggtttcgcgcaatttcgttgccgcacgtcacccattccgaaaacgggtgtcggggtgcattcaaagcacaagtttttgccaccggaaccatttcttcgtttttcgcaacaaacatgccgactaaactactttaggtccaaaactcaagttttgggtggtttcgcgcaatttcgttgccgcacgtcacccattccgaaaacgggtgtcggggtgcataacaacacgagtttttgccaccggaaccatttcttcatttttcgcaacgaacatgcccaatccactactttaggtccaaaactcatgtttggggtggtttcgcgcaatttcgttgctgcacgtcacccattccgaaaacgggtgtcgggtgcatacaatgcacgagtttttgccaccgaaaccatttctttgtttttcgcaacgaacatgaccaatccactactttaggtccaaaactcatgttttgtatggtttcgcgcaatttcgttgccgcacgtcacccataccgaaaacgggtgtcggggtgcataaaagcaagagtttttgccaccggaaccatttttcatttttcgcaacgaacatgcccaatctactactttaggtccaaaactcatgtttggggtggtttcgcgcaatttcgttgccgcacgtcacccattccgaaaacgggtgtcggggtgcatacaatgcacgagtttttgccaccgaaaccatttctttgtttttcgcaacgaacatgcccaatccactactttaggtccaaaactcatgtttttagtggtttcgcgcaatttcgttgccgcatgtcacccattccgaaaacgggtgtcggggtgcataaaagcacgagtttttgccaccggaaccatttcttcgtttttcgcaacgaacacgcccaatacactactataggtccaaaactcatttttttgggtggtttcgcgcaatttcgttgccgcacgtcaaccattccgaaaacgggtgtcaagggtgcataaaagcacgagtttttgccaccagaaccatttctttttttcgcaacgaacatgctcaatccactacttaaggtccaactcatgtttggggtggtttcgcgcaatttcgttgcagcacgtcacccattccgacaacaggtgtcgggggtgcatacaatgcacgagtttttgccatcggaaccatttcttcgtttttcgcaatgaacatgcccaatccactactttaggtccaaaacacatgttttgggtggtttcgcgcaatttcgttgccacatgtcacccattccgaaatgggtgtcggggtgcataaaagcacgagtttttgccaccggaaccatttcatcatttttcgcaacgaacatgcccaatacactactttaggtctaaaactcatgtttggggtggtttcgcacaatttcgttgtcgcacgtcacccatttcgaaaacgggtgtcggggtgcataaaagcacgagtttttgccaccggaaccatttcttcgtttttcgcaacgaacatgcccaatccactactttaggtccaaaacccatgtttggggtggtttcgcgcaatttcgttgccgcacgtcacccattctaaaaacggttgtcggggtgcataaaagcacgagtttctgccaccggaaccatttcttcatttttcgcaacgaacatgcccaatccactactttaggtccaaaactcatgttttgggtggtttcacgcaatttcgttgccgcacgtcacccattccgaaaacgggtgtcggggtgcataaaagcacgagtttttgccaccggaatcatttcttcgtttttcacaacgaacatgcccaatccactactttaggtccaaaacccatgtttggggtggtttcgcacaatttcgttgccgcacgtcacccattccgaaaacgggtgtcggggtgcataaaagcacgagtttttgccaccggaaccatctcttcatttttcgcaacgaacatgcccaatccactactttaggtccaaaactcatgtttgggttggtttcgcgcaatttcgtcgccgcacgtcacccattccgaaaacgggtgtcggggtgcatacaatgcacgagtttttgccaccgaaaccatttctttgtttttcgcaacgaacatgcccaatccactactttaggtccaaaactcatgttttgggtggtttcgcgcaatttcgttgccgcacgtcacccattccaaaaacgggtgttggggtgcataaatgcacgagtttttgccaccggaaccatttcttcgtttttcgcaacgaacatgcccaatacactactttaggtccaaaactcatgtttggggtggttatcgcaatttcgtcgccgcacgtcacccattccgaaaacgggtgtcggggtgcataaaagcacgagtttttgccaccggaaccatttcttcgtttttcgcaacgaacatgcccaatccactactttaggtccaaaactcatgtttggggtggtttcgcgcaatttcgttgcagcacgtcacccattccgaaaacgggtgtcggggtacatacaatgcacgagtttttgccaccggaaccgtttcttcgtttttcgcaatgaacatgcgcaatccactactttaggtccaaaacacatgttttgagtggtttcgcgcaatttcgttgccgcacgtcacccattccgaaaacgggtgtcggggtgcataaaagcacaagtttttgccaccggaaccatttcttcgttttttgcaacgaacatgcccaatacactactttatgtccaaaactcatgtttggagtggtttctcgcaatttcgttgccgcacgtcaaccattccgaaaacgggtgtcgggggtgcataaaagcacgagtttttgccaccagaaccatttcttctttttcgcaacgaacatgcccaatccactacttaaggtccaaaactcatgtttggggtggtttcgcgcaatttcgttgccccacgtcacccattccgaaaacgggtgtcggggtgcatacaatgcacgagtttttgccacgggaaccatttcttcgtttttcgcaacgaacatgcccaatccactactttaggtccaaaacatatgttttgggtggtttcgcgcaatttcgttgccgcacgtcacccattccgaaaatgggtgtcggggtgcattcaaagcacaagtttttgccaccggaaccatttcttcgtttttcgcaacgaacatgcccaatccactacttaaagtccaaaactcatgttttgggtggttttgcgcaatttcgttgtcgcacgtcaaccattccgaaaacgggtgtcgggggtgcataaaagcacgagtttttgccaccagaaccatttcttcttttttcgcaacgaaaatgcccaatccactacttaaagtccaaaactcatgtttggggtggtttcgcgcaatttcgttgcagcacgtcacccattccgaaaacgggtgtcggggtgcatacaatgcacgagtttttgccaccggaaccatttcttcgtttttcgcaacgaacatgcccaatccactactttaggtccaaaacacatgttttgggtggtttcgcgcaatttctttgccgcacgtcacccattccgaaaacgggtgtcagggtgcgtaaaagcacgagtttttgccaccggaaccatttcttcgtttttcgcaacgaacatgcccaatacactactttaggtctaaaactcatgtttgggtggtttcgcgcaatttcgttgccgcacgtcacccatttcgaaaacaggtgtcggggtgcataaaagcacgagtttttgccaccagaaccatttcttcgtttttcgcaacgaacatgcccaatccactactttaggtccaaaacccatgtttggggtggtttcgtgtaatttcgttgccgcacgtcacccattctaaaaacgggtgtcggggtgcataaaagcacgagtttttgccaccggaatcatttcttcgtttttcgcaacgaacatgcccaatccactactttaggtccaaaacccatgtttggggtggtttcgcgcaatttcgttgccgcatgtcacccattccaaaaacgggtgtcggggtgcatataagcacgagtttttgccaccggaaccatttcttcatttttcgcaacgaacatgcccaatccactactttaggtccaaaactcatgtttggggtggtttcgcgcaatttcgttgccgcacgtcacccattccgaaaacgggtgtggggtgcatacaatgcacgagtttttgccaccggaaccatttcttcgtttttcgcaacgaacatgcccaatccactactttaggtccaaaacacatgttttgggtggtttcgcgcaatttcgttgccgcacgtcacccattccaaaaacgggtgtccgggtgcatattgggtggtttcgcgcaatttcgttgccgcacgtcacccattccaaaaacgggtgtccgggtgcataaaagcacgagtttttgccaccggaaccatttcttcgtttttcgcaacgaacatgcccaatacactactttaggtccaaaactcatgtttggggtggtttcgcgcaatttcgtcgccgcacgtcacccattccgaaaacgggtgttggggtgcataaaagcacgagtttttgccaccggaacgatttcttcgtttttcgcaacgaacatgcccaatccactactttaggtccaaaacccatgtttggggtggtttcgcgcaatttcgttgccgcacgtcacccattccgaaaacgggtgtcgggtgcataaaaggacgagtttttgccaccagaaccattacttcttttttcgcaacgaacatgcccgatccactactttaggtccaaaactcatgtttggggtggtttcgcgcaatttcgttgccgcacgtcacccattccgaaaaacgggtgtcggggtgcataaaagcatgagtttttgccaccagaaccatttcttcgtttttcgcaacgaacatgcccaatacactactttaggtccaaaactcatgtttggggtgggttcgcgcaatttcgttgccgcacgtcacccatttcgaaaacgggtgtcggggtgcataaaagcacgagtttttgccaccggaaccatttcttcatttttcgcaacgaacatgcccaatcccctacttcaggtccaaaactcatgtttggggtggttttgcgcaatttcgttgccgcacgtcacccatttcgaaaacgggtgttgggtgcatacaatgcacgagtttttgccaccggaacacgaatcaagcttaatctcggacactca

SEQ ID NO: 52 - DNA, 864 bp, Zea mays
acgaatcgaagattcatcgccactgtgctggaagcatcagactccggcatcgcaaactgcacccggtgccgggcagccacatccagcgcaaaaaccttcgtgtagacttccgttgaactgatggacttatgtcccatcaggctttgcagaactttcagcggtataccggcatacagcatgtgcatcgcataggaatggcggaacgtatgtggtgtgaccggaacagagaacgtcacaccgtcagcagcagcggcggcaaccgcctccccaatccaggtcctgaccgttctgtccgtcacttcccagatccgcgctttctctgtccttcctgtgcgacggttacgccgctccatgagcttatcgcgaataaatacctgtgacggaagatcacttcgcagaataaataaatcctggtgtccctgttgataccgggaagccctgggccaacttttggcgaaaatgagacgttgatcggcactccgcttattatcacttattcaggcgtagcaaccaagcgtttaagggcaccaataactgccttaaaaaaattacgccccgccctgccactcatcgcagtactgttgtaattcattaagcattctgccgacatggaagccatcacaaacggaatgatgaacctgaatcgccagcggcatcagcacccttgtcgccttggcgtaatatatttgcccctggtgaaaaacgggggggaacaagttggccattttgggccacgttttaatccaaacctgggtgaaactccccccaggtattggctgaaaaacaaaaaacctaattctccaataaaccccttaagggaaaatagggcccggtttttcaccgtaacaccaccccaccttttgt

SEQ ID NO: 53 - DNA, 835 bp, Zea mays
acttctgaagataatcagcttgattcgctgaagctccaatgtgctggaaaggttttgaaatccatgttttgtagctgtattgttccttaaggcaataattctatcctccacgtaatttgtaacctgcacacgaatttaatacccgactttgggtttctgatttcaccacaaaccgagtcaacatcgtttccttatttttctccttcggttacgtcaaaaaaaaacagaaaaaacaaaccgagtcaacggccgtttccttgattttctccttcggttacgaaaaaaaaacagcaaaaaaaaacaaaccgagtcaaccttccttgtttttctccttcggttacgtcaaaaaaacagaaaaaaaagataacgaaggagaaaggatacggttgtttcatcccggtcgtttttagaacataacttgaggtaccttccgtaaaccgggcataacttttcgctcgggtgtccaaaaaatctgaaatttttataggagctagttgacaccattctgaggccggccaaactcacctacggtctgtttggggttcgacaaaattgtcaaaaaaattcaggaaaataaagaaaaaaatccgtcaaagttctcgcacgcttttcagagaacttcctgattttctgtagaccacatctgatatctgttttaggtgaaacttcgtgtagctcctatcttgttgcttcttgtgctgagaaaaatatcaaaagaatcatacaaaaaagcaaaacaaaatcacctgtgatttctactagtggcttttttgcatcactagtacaatatttacggtactggccttcctgctagtttccatcctccctttgcacc

SEQ ID NO: 54 - DNA, 903 bp, Zea mays
cgattctagatatcatcgccactcgtgctggaaaggaccagacaaacacagaaaaattccagacatattcctacttattcagtacagtccctgaactaaacccccactatagctctatcactgttcagtcgccagaatgtcttcgtcaaaacagcctcaccaggaggaccatcccgattcggagcctgaaatgctcgcggaggatgatgctcttgaggagattgacgcttccgaggacgtcgacgttcccatggacagcgacgatgagggggagcccgaagagatcaacctgcacaacgacggcgtcgcctactttgacctacacaaggactcggttttcgccattgcccaacatccaacccgcccgacactgatcgcaacgggtggatcagaaggagactcggacgacgcgccaggcaagggctacgtctttgacaccgcacacgttccccagcgccctctattaccaccaaactttagcggcgaacctccgaaccccccggtagcgctggaccgtctgtttgagattgatgggcataccgacagcatcaatgctttgacgttcacctaccccgagggagagtatctcttgagcggaggtatggacggcaagcttcgcgcgtacgccggcaaggcggcaccatttcaaccgggagccgcccatgtcaccagtcgcacaaatcccccttccttgccgagtcccaggaagtcccccaaatcaacttcctatcttcccttgccccattgctccatcgtcctcccttgtccttagaccttggctggcatcctgaccggctccgtctggtgtgtacccatggaagaacgcaggctccccaatcccggcgctggtctaatcccgaaagacattttccttcttccctaatatgggccccggacccacta

SEQ ID NO: 55 - DNA, 1110 bp, Zea mays
ctccggaatgattcaagcttggattcgctgaagctccaatgtgctggaaagatgttcgttgagaaaaacgaagaaatggttcctgtggcaaaaactcgtgctttgtatgcaccatgacacccgttttcagaatgggtgacgtgcgacaacgaaattgtgcgaaaccaccccaaacatgagttttggacctaaagtagtggattgggcatgttcgttgcgaaaaacgaagaaatggttccggtggcaaaaattcgtgctttgtatgcaccatgacacccgttttcggaatgggtgacgtgcgacaacgaaattgtgcgaaacgacctaaagtagtggattgggcatgtttgttacgaaaaacgaagaaatggttccggtggcaaaaactcgtgcttttatgcaccccgatacccgttttcagaataggtgacgtgtgacaacgaaattgcgcgaaaccacctcaaacatgagttttggacctaaagtagtggattgggcatgttcgttgcgaaaaacgaagaaatggttccggtggcaaacactcgtgcttttatgcacccgacactcgttttcagaatgagtgacgtgcggcaacgaaattgcgtgaaaccacccaaaacatgagttttgtacctaaagtagtggattgggcatgttcgttgagaaaaacgaagaaatggttccagtggcaaaaactcgtgctttgtatgcacccgacacccgttttcggaatgggtgacgtgcgacaacgaaattgtgcgaaaccaccccaaacatgagttttggacctaaagtagtggattgggcatgtttgttacgaaaaacgaagaaatggttccggtggcaaaaactcgtgcttttatgcaccccgatacccgttttcagaatgggtgacgtgcgacaacgaaattgcgcgaaaccacctcaaatatgagttttggacctaaagtagtggattgggcatgttcgttgcgaaaaacgaagaaatggttccggtggcaaacactcgtgcttttatgcacccgacactcgttttcggaatgagtgacgtgcggcaacgctttccagcacattggagcttcagcgaatcaagcttgataccattctgta

SEQ ID NO: 56 - DNA, 586 bp, Zea mays
ggcctttttacggttcctggccttttgctggccttttgctcacatgttctttcctgcgttatcccctgattctgtggataaccgtattaccgcctttgagtgagctgataccgctcgccgcagccgaacgaccgagcgcagcgagtcagtgagcgaggaagcggaagagcgcccaatacgcaaaccgcctctccccgcgcgttggccgattcattaatgcagctggcacgacaggtttcccgactggaaagcgggcagtgagcgcaacgcaattaatgtgagttagctcactcattaggcaccccaggctttacactttatgctcccggctcgtatgttgtgtggaattgtgagcggataacaatttcacacaggaaacagctatgaccatgattacgccaagcgcgcaattaaccctcactaaagggaacaaaagctgggtaccgggccccccctcgaggtcgacggtatcgataagcttgatagagtgaagttgtcgcatgtatcaagtgatccagaatcgtactgcaactttacttttaatggagctatcagcgaatcagagctgattctcagtagtacaaaa

SEQ ID NO: 57 - DNA, 857 bp, Zea mays
  misc_feature (827)..(827): n is a, c, g, or t
  misc_feature (847)..(847): n is a, c, g, or t
agaaaaataagcacaagttttatccggcctttattcacattcttgcccgcttgatgaatgctcatccggaattacgtatggcatgaaaagacggtgagctggtgatatgggatagtgttcacccttgttacaccgttttccatgagcaaactgaaacgttttcatcgctctggagtgaataccacgacgatttccggcagtttctacacatatattcgcaagatgtggcgtgttacggtgaaaacctggcctatttccctaaagggtttattgagaatatgtttttcgtctcagccaatccctgggtgagtttcaccagttttgatttaaacgtggccaatatggacaacttcttcgcccccgttttcaccatgggcaaatattatacgcaaggcgacaaggtgctgatgccgctggcgattcaggttcatcatgccgtttgtgatggcttccatgtcggcagaatgcttaatgaattacaacagtactgcgatgagtggcagggcggggcgtaatttttttaaggcagttattggtgcccttaaacgcctggttgctacgcctgaataagtgataataagcggatgaatggcagaaattcgaaagcaaattcgacccggtcgtcggttcagggcagggtcgttaaatagccgcttatgtctattgctggtttaccggtttattgactaccggaagcagtgtgaccgtgtgcttctcaaatgcctgaggccagtttgctcaggctctccccgtggaggtaataattgacgatatgatcctttttttctgatcaaaaaggatctaggtgaagatcctttttgcttccnagcacagtggcgatgatatnctagaattcg

SEQ ID NO: 58 - DNA, 119 bp, Zea mays
agctccaatgtgctggaaaggcaacggtgcacttggcggaaaggccttgggtgcttgctggcggattgcagtgtcgttttgcgtggggataaatcctttccagcacagtggcgatgata

SEQ ID NO: 59 - DNA, 1510 bp, Zea mays
  misc_feature (1491)..(1491): n is a, c, g, or t
ggaagattgggcatgtccttgcgaaaaacgaagaaatggttccggtggcaaaaactcgtgctttgtatgcacccgacacccgttttcggaatgggtgacgtgcgacaacgaaattgtgcgaaaccaccccaaacatgagttttggacctaaagtagtggattcggcatgttcgttacgaaaaacgaagaaatggttccggtggcaaaaactcgtgcttttatgcaccccgatacacgttttcagaatgggtgacgtgcgacaacaaaattgcgcgaaaccaccccaaacatgagttttggacctaaagtagtggattgggcatgtccttgcgaaaaacgaagaaatggttccggtggcaaaaactcgtgctttgtatgcacccgacacccgttttcggaatgggtgacgtgcgacaacgaaattgtgcgaaaccaccccaaacatgagttttggacctaaagtagtggattcggcatgttcgttacgaaaaacgaagaaatggttccggtggcaaaaactcgtgcttttatgcaccccgatacacgttttcagaatgggtgacgtgcgacaacaaaattgcgcgaaaccaccccaaacatgagttttggacctaaagtagtggaattgggcatgtccttgcgaaaaacgaagaaatggttccggtggcaaaaactcgtgctttgtatgcacccgacacccgttttcggaatgggtgacgtgcgacaacgaaattgcgagaaaccaccccaaacatgagttttggacctaaagtactggattaggcatgttcgttgcgaaaaacgaagaaatggttccggtggcaaaaactcgtgctttgtatgcacccgatacccgttttcggaatgggtgacgtgcgacaactaaattgtgtgaaaccaccccaaacatgagttttggacctaaagtagtggattgggcatgttcgttacgaaaaacgaagaaatggttccggtggcaaaaactcgtgctttgtatgcaaccccacactcgttttcggaatgagtgacgtgcggcaacgaaattgcgcaaaaccacccaaaacatgagttttgtacctaaagtagtggattgggcatgttcgttgagaaaaacgaagaaatggttcctgtggcaaaaactcgtgctttgtatgcaaccccacacccgttttcagaatgggtgacgtgcggcaacgaaattgcgcgaaaccacccaaaacatgagttttggacctaaagtagtggattggcatgttcgttgcgaaaaacaaagaaatagttccggtggcaaaaactcgtgctttgtatgcaccatgacacccgttttcagaatgggtgacgtgcgacaacgaaattgtgcgaaaccaccccaaacatgagttttggacctaaagtagtggattgggcatgttcgttgcgaaaaacgaagaaatggttccggtggcaaaaactcgtgctttctttccagcacattggagcttcagcgaatcnaagctgatacatacaggga

SEQ ID NO: 60 - DNA, 1785 bp, Zea mays
gggttttggggccgaggatcagcgagctgattcgtcgccactgtgctggaaaggtcatctaaattgaaaccgcccttttatgttatttgaattccagtcatgttcttttttcccctttcgttttacaagccttcatttgttcagcatattcattaatttatgatggatagaacttagaagtagtagcagtaacaagtacgcaaataataaacatgtatgacaataagtgaatgtgttaactatatactgaccattatgaatgtgacataagaaatagagaaatttcaaagactccatcccatcatgaattcatggtttacttacattaaacaagaatagtatacatttgtatagtggtaacagaaaaatatggcacagagcagcaattctgctcaagtccctagtgttacattataacaaagaatattcacgttatgcgagtccatttcagctgataagaacaacaagaagaattcctagtcaggaacttactcgtggcaatagcaattggtgcagttgttggccaatgttccttccatcggactagcttagcacttgacagttcaaagctgcaacactcactcgtccaacctttcccagcacattggagcttcagctgctcgaggggggggcccggtacccaattcgccctatagtgagtcgtattacgcgcgctcactggccgtcgttttacaacgtcgtgactgggaaaaccctggcgttacccaacttaatcgccttgcagcacatccccctttcgccagctggcgtaatagcgaagaggcccgcaccgatcgcccttcccaacagttgcgcagcctgaatggcgaatgggacgcgccctgtagcggcgcattaagcgcggcgggtgtggtggttacgcgcagcgtgaccgctacacttgccagcgccctagcgcccgctcctttcgctttcttcccttcctttctcgccacgttcgccggctttccccgtcaagctctaaatcgggggctccctttagggttccgatttagtgctttacggcacctcgaccccaaaaaacttgattagggtgatggttcacgtagtgggccatcgccctgatagacggtttttcgccctttgacgttggagtccacgttctttaatagtggactcttgttccaaactggaacaacactcaaccctatctcggtctattcttttgatttataagggattttgccgatttcggcctattggttaaaaaatgagctgatttaacaaaaatttaacgcgaattttaacaaaatattaacgcttacaatttaggtggcacttttcggggaaatgtgcgcggaacccctatttgtttatttttctaaatacattcaaatatgtatccgctcatgagacaataaccctgataaatgcttcaataatattgaaaaaggaagagtatgagtattcaacatttccgtgtcgcccttattcccttttttgcggcattttgccttcctgtttttgctcacccagaaacgctggtgaaagtaaaagatgctgaagatcagttgggtgcacgagtgggttacatcgaactggatctcaacagcggtaagatccttgagagttttcgccccgaagaacgttttccaattgatgagcactttttcgaccgaataaatacctgtgacgggaagatcacttcgcaaaaataaataaaatcctgggtgtccctgttgataccgggaaagccctggggccaacttttggcgaaaatgaaaacgttgatccggcacgtaagtttcttccccctttcctcta

SEQ ID NO: 61 - DNA, 867 bp, Zea mays
gtaggcaggacttttcaagtcttgggaagggttttttcaatttgcatttcgcttcgaattagatattaacaagttgtttgggtgttcgaatttcaacaggtaaagttagttgctagaacccatggctcctttgccgacgctgagtagattttaggtgacgggtggtgacaatgagtccgtgtcgagcgctgattttttcggcctttagagcgagatttatacaatagaatttggcatgagattggattgcttttagtcagcctcttatagcctaaagtctttgagtgactagatgacatatcatgtaagttgctgataggtttccagttttccgctcctaggtctgcatattgtacttttcctcttactcgacttaaccagtaccaacccagcttctcaacggatttataccatggcactttaaagccagcatcactgacaatgagcggtgtggtgttactcggtagaatgctcgcaaggtcggctagaaattggtcatgagctttctttgaacattgctctgaaagcgggaacgctttctcataaagagtaacagaacgaccgtgtagtgcgactgaagctcgcaataccataagtcgtttttgctcacgaatatcagaccagtcaacaagtacaatgggcatcgtattgcccgaacagataaagctagcatgccaacggtatacagcgagtcgctctttgtggaggtgacgattacctaacaatcggtcgattcgtttgatgttatgttttgttctcgctttggttggcaggttacggccaagttcggtaagagtgagagttttacagtcaagtaatgcgtggcaagccctttccagcacagtggcgatgatatctagattcgcg

SEQ ID NO: 62 - DNA, 3369 bp, Zea mays
  misc_feature (3353)..(3354): n is a, c, g, or t
cttcagaatgaatcaaagcttgattcgctgaagctccaatgtgctggaaagatgcacccgacacccgttttcggaatgggtgacgtgcgacaacaaaattgcgcgaaaccaccccaaacatgagttttggacctaaagtagtggattgggcatgttcattgcgaaaaacgaagaaatggttccggtggcaaaaactcgagctctgtatgcacccgacacccgttttcggaatgggtgacgtgcgacaacgaaattgcgtgaaaccaccccaaacatgagttttggacctaaagtagtggattgggcatgttcgttgcgaaaaacgaagaaatggttccggtggcaaaaactcgtgctttgtatgcacccgacacccgttttcggaatgggtgacgtgcgacaacgaaattgcgagaaaccacctcaaacatgagtttggacctaaagtagtggattgggcatgttcgttacgaaaaacgaagaaatggttccggtggcaaaaactcgtgctttgtatgcacccgacacccgttttcggaatgggtgacgtgcgacaacgaaattgtgcgaaaccaccccaaacatgagttttggacctaaagtagtggattgggcatgtttgttgcgaaaaacaaagaaatggttccggtggcaaaaactcgtgctttgtatgcaccatgacacccgttttcggaatgggtaacgtgcgacaacaaaattgcgagaaaccaccccaaacatgagttttggacctaaagtagtggattaggcatgttcgttgcgaaaaacgaagaaatggttccggtggcaaaaactcgtgctttgtatgcactccgacacccgttttcggaatgggtgacgcgtgacaacaaaattgcgcgaaaccaccccaaacatgagttttgaacctaaagaagtggattgggcatgttccgttacaaaaaacgaagaaatggtttccggtggcaaaaactcgtgcttttgtatgccaccccgacacccgtttttcgaaatggggtgacttgcgacaaccaaatttcgagaaatcccccccaacatgagttttggacctaaagtagtggattgagcatgttcgttgcgaaaaacgaagaaatggttccggtggcaaaaactcgtgctttttattcacccgacacccgttttcggaatgggtgacgtgcgacaacgaaattgcgcgaaaccaccccaaacatgagttttggatgtaaagtagtggattgggcatgttcgttgcgaaaaacgaagaaatggttccggtggcaaaaactcgtgctttgtatgcacccgacacccgttttcggaatgggtgacgtgcgacaacgaaattgtgcgaaaccaccccaaacatgagttttggacctaaagtagtggattcggcatgttcgttacgaaaaacgaagaaatggttccggtggcaaaaactcgtgcttttatgcacccgacacccgttttcagaatgggtgacgtgcgacaacaaaattgcgcgaaaccaccccaaacatgagttttggacctaaagtagtggattcggcatgttcgttgcgaaaaacgaagaaatggttccggtggcaaaaactcgtgctttttatgcaccccgatacccgttttcagaatgggtgacatgcgacaacaaaattgcacgaaaccaccccaaacatgagttttggacctaaagtagtggattgggcatgttcgttgcgaaaaacgaagaaatggttccggtggcaaaaactcgtgcttttatgcaccccgataccctttttcagaatgggtgacgtgcgacaacgaaactgtgcgaaaccaccccaaacatgagttttggacctatagtagtggattgggcatgttcgttgtgaaaaacgaagaaatggttccggtggcaaaaactcgtgctttgtatgcaccccgacaaccgttttcggaatgggtgacgtgcggcaacgaaattgcgcgaaaccaccccaaacatgagttttggacctaaagtagtggattgggcatgttcgttgcgaaaaacgaagaaatggttccggtggcaaaaactcgtgcttttatgcaccccgatacccgttttcagaatgggtgacgtgcgacaacgaaattgtgcgaaacctccccaaacatgagttttggacctaaagtagtggattgggcatgttcgttgcgaaaaacgaagaaatggttccggtggcaaaaactcgtgctttgtatgcacccccgacaaccgttttcggaatgggtgacgtgcggcaacgaaattgcgcgaaaccactccaaacatgagttttggacctaaagtagtggattgggcatgttcattgcgaaaaacgaagaaatggttccggtggcaaaaactcgtgctttttattcacccgacacccgttttcggaatgggtgacgtgcgacaacgaaattgcgcgaaaccaccccaaacatgagttttggatgtaaagtagtggattgggcatgttcgttgcgaaaaacgaagaaatggttccggtggcaaaaactcgtgctttgtatgcacccgacacccgttttcggaatgggtgacgtgcgacaaagaaattgcgcgaaaaccaccccaaacatgagttttggatgtaaagtagtggatggggcatgttcgttgcgaaaaacgaagaaatggttccggtggcaaaaactcgtgcttttatgcaccccgatacccgttttcagaatgggtgacgtgcgacaacgaaattgcgcgaaaccaccccaaacatgagttttggacctaaagtagtggattgggcatgttcgttgcgaaaaacgaagaaatggttccggtggcaaaaactcgtgcttttatgcaccccgatacccgttttcagaatgggtgacgtgcgacaacgaaactgtgcgaaaccaccccaaacatgagttttggacctaaagtagtggattgggcatgttcgttatgaaaaacgaagaaatggttccggtggcaaaaactcgtgctttgtatgcaccccgacaaccgttttcggaatgggtgacgtgcggcaacgaaattgcgcgaaaccaccccaaacatgagttttggacctaaagtagtggattgggcatgttcgttgcgaaaaacgaagaaatggttccggtggcaaaaactcgtgctttttattcacccgacacccgttttcggaatgggtgacgtgcgacaacgaaattgcgcgaaaccaccccaaacatgagttttggatgtaaagtagtggattgggcatgttcgttgcgaaaaacgaagaaatggttccggtggcaaaaactcgtgctttctttccagcacattggagcttcagcgaatcaagctnngatatcattcggaag

SEQ ID NO: 63 - DNA, 5594 bp, Zea mays
cgatatctagaatcatcgccactgtgctggaaaggagtgtatagagaaaattgaggccattcttaaggaacttgaaaagccagcaccctgatgcgaccacgttttagtctacgtttatctgtctttacttaatgtcctttgttacaggccagaaagcataactggcctgaatattctctctgggcccactgttccacttgtatcgtcggtctgataatcagactgggaccacggtcccactcgtatcgtcggtctgattattagtctgggaccacggtcccactcgtatcgtcggtctgattattagtctgggaccacggtcccactcgtatcgtcggtctgataatcagactgggaccacggtcccactcgtatcgtcggtctgattattagtctgggaccatggtcccactcgtatcgtcggtctgattattagtctgggaccacggtcccactcgtatcgtcggtctgattattagtctggaaccacggtcccactcgtatcgtcggtctgattattagtctgggaccacggtcccactcgtatcgtcggtctgattattagtctgggaccacgatcccactcgtgttgtcggtctgattatcggtctgggaccacggtcccacttgtattgtcgatcagactatcagcgtgagactacgattccatcaatgcctgtcaagggcaagtattgacatgtcgtcgtaacctgtagaacggattaacctcggtgtgcggttgtatgcctgctgtggattgctgctgtgtcctgcttaatccacaacattttgcgcacggtttatgtggacaaaatacctggttacccaggccgtgccggcacgttaaccgggctgcatccgatgcaagtgtgtcgctgtcgacgagctcgcgagctcggacatgaggttgccccgtattcagtgtcgctgatttgtattgtctgaagttgtttttacgttaagttgatgcagatcaattaatacgatacctgcgtcataattgattatttgacgtggtttgatggcctccacgcacgttgtgatatgtagatgataatcattatcactttacgggtcctttccggtgatccgacaggttacggggcggcgacctcgcgggttttcgctatttatgaaaattttccggtttaaggcgtttccgttcttcttcgtcataacttaatgtttttatttaaaataccctctgaaaagaaaggaaacgacaggtgctgaaagcgagctttttggcctctgtcgtttcctttctctgtttttgtccgtggaatgaacaatggaagtccgagctcatcgctaataacttcgtatagcatacattatacgaagttatagcggccgcacaccggtgttcctaaggacatattccgttcgtacttgagttattggatctatgaaatcgctcgctatacaccagtcatgattttgtccctggtaataggggttttggttttattaattatattttttaatgacaacgaagcttgtgttttcaattctgcaatatttgcttttacttctcttgtaggtttgttaataatattaagtgatggtaatccaaagctagtcagtcgtcgaaattttaggaccgagcttttagtggatgtcatcacacgtaaaccggcggtagaagggaaagaatggaggatcatcacatacaacatgaaccaatatttgtttaatcatgggcaatggcatactccgtattacttttacagcgatgaggattgctaccgttattttctacgccttgttgagggagtaacccccaagaagcaaacagccacgtcaattggcaattctccggtcaccgctaagcctgaagatgccatcgagtcagcttctcctagttccagactgaattatcaaaactttttgctcaaggcagcggagatcgaacgacaaggtcaggaaaattactggtgaaggcggcatcccaatatcgatgcgcttcttaaaaagatggaatagcttagagacattgccttacgtaaagggaacataaactagagtatgatatttaatcagcactaactggccggaaaacggccgaaggaagcctcgaaaagtcgattcgtgttggacccatttgctgaacaaagtggttcattgcctacctattatggtagtagtcgtgataatcgtgtggttggttttgtcaacggtgcatttgcattttcatgacaataaaccttgcgttttcgttctcgggatattactttccctccacttctttcgcctcaatagctcctataagcattctcagggcgtatgtcggtgatcgagatttccaagcaagcttttagtggaaatcatcgcgcgcaagccagcggtaaagggaaaagaacggaggacgattacatacaagatgaacgaataaataaattaataataaataataataaaaagtacagtagcattaaatattattaagtttaatgattaaaaattggttaattgtcaagaaaatctaaggtattaataaataaataatactatgacaacctgcagcgaaagcatcagccccaatgaaaattaatcagaattgaatctgagcgtatttatttgataacggtttacgtaactgttggaataaaaatcaactatcatctactaactagtgtttacgttactagtatattatcatatacggtgttagaagatgacgcaaatgatgagaaatagtcatcgttttcaacggaagctgaaatacaaggattgataatgtaataggatcaatgaatatcaacatataaaacgatgataataatatttatagaattgtgtagaattgcagattcccttttatggattcctaaatcctcgagaagaacttctagtatatctacgtacctaatattattgccttattaaaaatggaatcccaacaattatctcaaaattcccccaattctcatcagtaacaccccaccccgtattacttttaccgtgatgaagattggcatcgttactttctaaacgtaggacgtgcggaatgacaaaaccatcagcagtgtcacgatctctccagtcacaatggcaatcatgagtgcatagtccaaagtaaaggggcaaggaaaagcatgattgaaaggactccccatctggactctatatgtcatcagcggctaaaaaaaagcatatagcacaacatcagcatcagcatcagcactagagtcatcggcccggcggtccgcggtcatccccgcggactttccgtccgcccggcgggctgtatcagcgtcaactggaacgcgcatatatatacaagacacacataacatagaagcacacccacgacaataaccacacgacaataaccacacccgcccacccctcctttccgtatacaaggcctcggtacctcttaaaaactttctctcaattctctctaccgtgatcaaggtaaatttctgtgttccttattctctcaaaatcttcgattttgttttcgttcgatcccaatttcgtatatgttctttggtttagattctgttaatcttagatcgaagacgattttctgggtttgatcgttagatatcatcttaattctcgattagggtttcatagatatcatccgatttgttcaaataatttgagttttgtcgaataattactcttcgatttgtgatttctatctagatctggtgttagtttctagtttgtgcgatcgaatttgtcgattaatctgagtttttctttttctttttgcaggtagagttaacgctagccttggtaccatacgtaagaaaatgattgaacaagatggattgcacgcaggttctccggccgcttgggtggagaggctattcggctatgactgggcacaacagacaatcggctgctctgatgccgccgtgttccggctgtcagcgcaggggcgcccggttctttttgtcaagaccgacctgtccggtgccctgaatgaactccaagacgaggcagcgcggctatcgtggctggccacgacgggcgttccttgcgcagctgtgctcgacgttgtcactgaagcgggaagggactggctgctattgggcgaagtgccggggcaggatctcctgtcatctcaccttgctcctgccgagaaagtatccatcatggctgatgcaatgcggcggctgcatacgcttgatccggctacctgcccattcgaccaccaagcgaaacatcgcatcgagcgagcacgtactcggatggaagccggtcttgtcgatcaggatgatctggacgaagagcatcaggggctcgcgccagccgaactgttcgccaggctcaaggcgcggatgcccgacggcgaggatctcgtcgtgacccatggcgatgcctgcttgccgaatatcatggtggaaaatggccgcttttctggattcatcgactgtggccggctgggtgtggcggaccgctatcaggacatagcgttggctacccgtgatattgctgaagagcttggcggcgaatgggctgaccgcttcctcgtgctttacggtatcgccgctcccgattcgcagcgcatcgccttctatcgccttcttgacgagttcttctgagcgggactctgggtacgtatgtcgacacaattgcagcgcttgagctctcctaggtccgcggacaaagctgggttttttttttttcaatttcgattcatctcaaggtttttggagtttttgattatggacttgtgagactcttagaatttctgttttatgatttattggataactgtgattctccaagaacttatgtcttatatgattttgtcttcatttcgttgcttcttatttcttgcctgtgatgtattgcatctgcatagttggattgaaagttaggttcttgggtttataagaaggctgtgacttgatgttacttagccatagctgatcaaatatcgtctaacaaagtggtctgttactctgttatattggttcgcgtaaattttggttacagtttgtttccgagttggtatctcgtaagtcgtaacgtttgtgtacttattcactggaagcaagttgtattgttgttagtcttttgttacctctcctggtacgattttttttgtttgtgaacaagatcagaaactgggactgtgaatttgaccgataaactagtcttaattaagatttaaatgcgagctcagcccgggcagcgatcgcaggccggccatcgatttattcaacaaagccacgttgtgtctcaaaatctctgatgttacattgcacaagataaaaatatatcatcatgaacaataaaactgtctgcttacataaacagtaatacaaggggtgttatgacgatggaccgcgcttgtgtgtcgcgttcagtttggcttttgccaagcagtagggtagcttcccgcgtcggtaattatatggtatgaaccatcaccttttggctctacatggtatgaacgtaagatacaaattccaactacctctagctcgccgcactagttcctgcaggttggcccacgtggcctctcgagtgtttaaactcggaccgtatcgatttattcaacaaagccgccgtcccgtcaagtcagcgtaatgctctgccagtgttacaaccaattaaccaaattctga

SEQ ID NO: 64 - DNA, 5111 bp, Zea mays
ctccggaagaaattaagcttgaatttcgctgaagctcaatgtgctggaaagtggaacacgagacctgtccaggttaagcaccattttatcgcccttatacaatactgtcgctccaggagcaaactgatgtcgtgagcttaaactagttcttgatgcagatgacgttttaagcacagaagttaaaagagtgataacttcttcagcttcaaatatcaccccagcttttttctgctcatgaaggttagatgcctgctgcttaagtaattcctctttatctgtaaaggctttttgaagtgcatcacctgaccgggcagatagttcaccggggtgagaaaaaagagcaacaactgatttaggcaatttggcggtgttgatacagcgggtaataatcttacgtgaaatattttccgcatcagccagcgcagaaatatttccagcaaattcattctgcaatcggcttgcataacgctgaccacgttcataagcacttgttgggcgataatcgttacccaatctggataatgcagccatctgctcatcatccagctcgccaaccagaacacgataatcactttcggtaagtgcagcagctttacgacggcgactcccatcggcaatttctatgacaccagatactcttcgaccgaacgccggtgtctgttgaccagtcagtagaaaagaagggatgagatcatccagtgcgtcctcagtaagcagctcctggtcacgttcattacctgaccatacccgagaggtcttctcaacactatcaccccggagcacttcaagagtaaacttcacatcccgaccacatacaggcaaagtaatggcattaccgcgagccattactcctacgcgcgcaattaacgaatccaccatcggggcagctggtgtcgataacgaagtatcttcaaccggttgagtattgagcgtatgttttggaataacaggcgcacgcttcattatctaatctcccagcgtggtttaatcagacgatcgaaaatttcattgcagacaggttcccaaatagaaagagcatttctccaggcaccagttgaagagcgttgatcaatggcctgttcaaaaacagttctcatccggatctgacctttaccaacttcatccgtttcacgtacaacattttttagaaccatgcttccccaggcatcccgaatttgctcctccatccacggggactgagagccattactattgctgtatttggtaagcaaaatacgtacatcaggctcgaaccctttaagatcaacgttcttgagcagatcacgaagcatatcgaaaaactgcagtgcggaggtgtagtcaaacaactcagcaggcgtgggaacaatcagcacatcagcagcacatacgacattaatcgtgccgatacccaggttaggcgcgctgtcaataactatgacatcatagtcatgagcaacagtttcaatggccagtcggagcatcaggtgtggatcggtgggcagtttaccttcatcaaatttgcccattaactcagtttcaatacggtgcagagccagacaggaaggaataatgtcaagccccggccagcaagtgggctttattgcataagtgacatcgtccttttccccaagatagaaaggcaggagagtgtcttctgcatgaatatgaagatctggtacccatccgtgatacattgaggctgttccctgggggtcgttaccttccacgagcaaaacacgtagccccttcagagccagatcctgagcaagatgaacagaaactgaggttttgtaaacgccacctttatgggcagcaaccccgatcaccggtggaaatacgtcttcagcacgtcgcaatcgcgtaccaaacacatcacgcatatgattaatttgttcaattgtataaccaacacgttgctcaacccgtcctcgaatttccatatccgggtgcggtagtcgccctgctttctcggcatctctgatagcctgagaagaaaccccaactaaatccgctgcttcacctattctccagcgccgggttattttcctcgcttccgggctgtcatcattaaactgtgcaatggcgatagccttcgtcatttcatgaccagcgtttatgcactggttaagtgtttccatgagtttcattctgaacatcctttaatcattgctttgcgtttttttattaaatcttgcaatttactgcaaagcaacaacaaaatcgcaaagtcatcaaaaaaccgcaaagttgtttaaaataagagcaacactacaaaaggagataagaagagcacatacctcagtcacttattatcactagcgctcgccgcagccgtgtaaccgagcatagcgagcgaactggcgaggaagcaaagaagaactgttctgtcagatagctcttacgctcagcgcaagaagaaatatccaccgtgggaaaaactccaggtagaggtacacacgcggatagccaattcagagtaataaactgtgataatcaaccctcatcaatgatgacgaactaacccccgatatcaggtcacatgacgaagggaaagagaaggaaatcaactgtgacaaactgccctcaaatttggcttccttaaaaattacagttcaaaaagtatgagaaaatccatgcaggctgaaggaaacagcaaaactgtgacaaattaccctcagtaggtcagaacaaatgtgacgaaccaccctcaaatctgtgacagataaccctcagactatcctgtcgtcatggaagtgatatcgcggaaggaaaatacgatatgagtcgtctggcggcctttctttttctcaatgtatgagaggcgcattggagttctgctgttgatctcattaacacagacctgcaggaagcggcggcggaagtcaggcatacgctggtaactttgaggcagctggtaacgctctatgatccagtcgattttcagagagacgatgcctgagccatccggcttacgatactgacacagggattcgtataaacgcatggcatacggattggtgatttcttttgtttcactaagccgaaactgcgtaaaccggttctgtaacccgataaagaagggaatgagatatgggttgatatgtacactgtaaagccctctggatggactgtgcgcacgtttgataaaccaaggaaaagattcatagcctttttcatcgccggcatcctcttcagggcgataaaaaaccacttccttccccgcgaaactcttcaatgcctgccgtatatccttactggcttccgcagaggtcaatccgaatatttcagcatatttagcaacatggatctcgcagataccgtcatgttcctgtagggtgccatcagattttctgatctggtcaacgaacagatacagcatacgtttttgatcccgggagagactatatgccgcctcagtgaggtcgtttgactggacgattcgcgggctatttttacgtttcttgtgattgataaccgctgtttccgccatgacagatccatgtgaagtgtgacaagtttttagattgtcacactaaataaaaaagagtcaataagcagggataactttgtgaaaaaacagcttcttctgagggcaatttgtcacagggttaagggcaatttgtcacagacaggactgtcatttgagggtgatttgtcacactgaaagggcaatttgtcacaacaccttctctagaaccagcatggataaaggcctacaaggcgctctaaaaaagaagatctaaaaactataaaaaaaataattataaaaatatccccgtggataagtggataaccccaagggaagttttttcaggcatcgtgtgtaagcagaatatataagtgctgttccctggtgcttcctcgctcactcgagggcttcgccctgtcgctcgactgcggcgagcactactggctgtaaaaggacagaccacatcatggttctgtgttcattaggttgttctgtccattgctgacataatccgctccacttcaacgtaacaccgcacgaagatttctattgttcctgaaggcatattcaaatcgttttcgttaccgcttgcaggcatcatgacagaacactacttcctataaacgctacacaggctcctgagattaataatgcggatctctacgataatgggagattttcccgactgtttcgttcgcttctcagtggataacagccagcttctctgtttaacagacaaaaacagcatatccactcagttccacatttccatataaaggccaaggcatttattctcaggataattgtttcagcatcgcaaccgcatcagactccggcatcgcaaactgcacccggtgccgggcagccacatccagcgcaaaaaccttcgtgtagacttccgttgaactgatggacttatgtcccatcaggctttgcagaactttcagcggtataccggcatacagcatgtgcatcgcataggaatggcggaacgtatgtggtgtgaccggaacagagaacgtcacaccgtcagcagcagcggcggcaaccgcctccccaatccaggtcctgaccgttctgtccgtcacttcccagatccgcgctttctctgtccttcctgtgcgacggttacgccgctccatgagcttatcgcgaataaatacctgtgacggaagatcacttcgcagaataaataaatcctggtgtccctgttgataccgggaagccctgggccaacttttggcgaaaatgagacgttgatcggcactgcccgctttccagtcgggaaacctgtcgtgccagctgcattaatgaatcggccaacgcgaaccccttgcggccgcccgggccgacgaccaattctcatgtttgacagcttatcatcaaatttctgccattcctccgctttattattcaacttattccggcgaagccactatggcgtttaagggcaccaataactgccttaaaaaatttacccccccccctgccccctccttcgcagtactgtttgaaatcattaaacatttttgccgaactggaaacccataaaaacgggcaggatgaaccttaatccgcccccggccttcccacccttggcaccttggggtaaaattatttcccaagggagaaacaggggcgccaaaaaaatcctcccaat

SEQ ID NO: 65 - DNA, 8559 bp, Zea mays
  misc_feature (8221)..(8222): n is a, c, g, or t
  misc_feature (8225)..(8225): n is a, c, g, or t
  misc_feature (8227)..(8228): n is a, c, g, or t
  misc_feature (8230)..(8230): n is a, c, g, or t
  misc_feature (8234)..(8236): n is a, c, g, or t
  misc_feature (8241)..(8241): n is a, c, g, or t
  misc_feature (8244)..(8245): n is a, c, g, or t
  misc_feature (8250)..(8250): n is a, c, g, or t
  misc_feature (8256)..(8256): n is a, c, g, or t
  misc_feature (8258)..(8258): n is a, c, g, or t
  misc_feature (8269)..(8269): n is a, c, g, or t
  misc_feature (8274)..(8274): n is a, c, g, or t
  misc_feature (8278)..(8278): n is a, c, g, or t
  misc_feature (8290)..(8290): n is a, c, g, or t
  misc_feature (8300)..(8301): n is a, c, g, or t
  misc_feature (8304)..(8304): n is a, c, g, or t
  misc_feature (8315)..(8315): n is a, c, g, or t
  misc_feature (8319)..(8319): n is a, c, g, or t
  misc_feature (8321)..(8321): n is a, c, g, or t
  misc_feature (8323)..(8323): n is a, c, g, or t
  misc_feature (8343)..(8343): n is a, c, g, or t
  misc_feature (8356)..(8356): n is a, c, g, or t
  misc_feature (8361)..(8361): n is a, c, g, or t
  misc_feature (8372)..(8372): n is a, c, g, or t
  misc_feature (8383)..(8383): n is a, c, g, or t
  misc_feature (8386)..(8387): n is a, c, g, or t
  misc_feature (8391)..(8391): n is a, c, g, or t
  misc_feature (8397)..(8397): n is a, c, g, or t
  misc_feature (8400)..(8400): n is a, c, g, or t
  misc_feature (8404)..(8404): n is a, c, g, or t
  misc_feature (8408)..(8408): n is a, c, g, or t
  misc_feature (8413)..(8413): n is a, c, g, or t
  misc_feature (8421)..(8421): n is a, c, g, or t
  misc_feature (8424)..(8424): n is a, c, g, or t
  misc_feature (8427)..(8427): n is a, c, g, or t
  misc_feature (8433)..(8433): n is a, c, g, or t
  misc_feature (8435)..(8435): n is a, c, g, or t
  misc_feature (8461)..(8461): n is a, c, g, or t
  misc_feature (8463)..(8465): n is a, c, g, or t
  misc_feature (8472)..(8472): n is a, c, g, or t
  misc_feature (8479)..(8479): n is a, c, g, or t
  misc_feature (8482)..(8483): n is a, c, g, or t
gggttctcgttactgatgatcagcttgattcgctgaagctccaatgtgctggaaagtatggattttgtgctgggattgcctaggactaggaagggacgtgatagtgtgtttgtggttgttgatagattttctaagatggcacatttcataccatgtcataaaactgacgatgctactcatattgctgatttgttctttcgtgaaattgttcgcttgcatggtgtgcccaacacaatcgtttctgatcgtgatgctaaatttcttagtcatttttggaggactttgtgggcaaaattggggactaagcttttattttctactacatgtcatcctcaaactgatggtcaaactgaagttgtgaatagaactttgtctactatgttaagggcagttctaaagaagaatattaagatgtgggaggactgtttgcctcatgttgaatttgcttataatcgatcattgcattctactacaaagatgtgcccatttcagattgtatatggtttgttgcctcgtgctcctattgatttaatgcctttgccatcttctgaaaaactaaattttgatgctactaggcgtgctgaattgatgttaaaactgcatgaaactactaaagaaaacatagagcgtatgaatgctagatataagtttgctagtgataaaggtagaaaggaaataaattttgaacctggagatttagtttggttgcatttgagaaaggaaaggtttcctgaattgcgaaaatctaagttgttgcctcgagccgatggaccgtttaaagtgctagagaaaattaacgacaatgcatataggctagatctgcctgcagactttggggttagccccacatttaacattgcagatttaaagccctacttgggagaggaagttaagcttgagtcgaggacgactcaaatgcaagaaggggagaatgatgaagacatccacactactgatgcatctataccaatacaagtaccaatttctggtcccattactcgcgctcgtgctcgtcaactcaaccatcaggtgattacactcttgagttcatgtccatcatatttagaccatggagacccgtgcactcttgttttgcttaggaatcagggagaagaccgaaagggaaaaggatttgaacatgctggattcggactgcagaagaacaccaacttgtgacggtcaccacggtcagatgcgggctcggattggaatgttcaagcacaacatggaaagcttatcaagtctactttcatatggatccggaattatagtcatatctgttctgaggccgccgtaatcattgttttattaccgagacatttcctgccttttctgcccatggtgctgcgtcaccctattttggcccaatgggtcgtgtatcaagttaggtccattagggacgcatcctagggttgcagcacgaccccaatacccttgtggtcgtcctcccatgtttataaaccccctagccgccaccaagaacagcgggttttgtttagatcaagtttagctctcgctacttgcttgcaagcgcgcgtgctagttcagccgcccgtcttcttgtcttcggaaccccaccatattgtagtttgatctttaaacctacatttagatctggtaattcagtacttgttctacttgttcttgctagttcttcgattgcttgcaggacgagtgccctagtggccagggtgtcacgctccacaagatcgtgacagccataggaggtggtgtatcggttgctaaggcgcagcgtctttggaaggctgtagtcgggccgtgaacgtcgtctcctcccccaatcgagttattccacaccctctcatcgaaagatcgggcaatcacccaacgggtgcacatcactgaatatcccgtgtacgtcctgtggaagaagcggcgcctttggcagggggcgccactggcttggtcgtccctgtgcgcgatgtagtgctaggcgtagaaggtgcagggctggaaggagttgagctgtgtgttggaccccggcctgcaagagagttagtatatgtctttgatcgtcgtccctgcacttcacgttcagctttgcaagcatattcaaacaatgtggttatatcaaaataatccttataatcaagtatatcctgaatttccctgttcaaaccaccacgaaaacgcgccatagcagcgtcatccgactcaactaaaccacaacgaagcatacccttttgtaactcctggtaataatcctcaacagactgtgaaccttgttgaaaacgctgcattttgttaagcaaatcacgagcataataggaaggaacaaatctgtggcgcatggcagtttttaattgggtccaagtaatgacactgttaatgggaagtttttgtttatactcacgccaccaaattaaagcaaaatcagtaaattcactaatggcagccttcacttggctattagcaggaatatcatggcatgaaaatttctgttctacctctaattcccaatcaagatatgcagcaggatcatatttaccattaaaagatggaattttaaatttaatcttagaaaataagtcattagggggatgacgaaccacacgacgtgcacgaccacggcgatctccatcgtcctgctcagtgtcaacgccgtattcctgctccatctttgtggtcagtgcatcaaggcgtgccaggatggtgtcgagtgtggtgcgagtcgccgtttgagcaaggtcaagttggttgaaacgctcggtcgtcgaagtgatcgttgaatcaagccgttcatgcatcgtcctaatgtcagcagcaagtccatcaacttgtccccttacttcctgcaactgggcatccaccatgtcgtgtgctcctgccatagttagcgcaaacaccaaaaggagaaaaaccaacgacaacaacaggggtgtactgctcacaaggcgctcacactagtgctgttatcaagttcttatccgttcttaccaagccacagtggtgaactgcaaccaacaggtggaaccggtgaaagattggatgagcgattgcgtggagaaacagaaacctgctcgtcgtagaaatatgtggagttgtgggtaggctgcactcaagtcaaggattagcacgatcaaacaataatgcaaagtagaattatagtgcaaaacacgaaactatattgctggccacaggtgcaaaggatggatggaactagcagaatggcagtaccgtaaatattgtactagtgatgccaaaaaggcactagtagaaatcacaggtgattttgtttttcttttttgtatgatttttttgatatttttctcagcacaagaagcaacaagataggagctacacgaagtttcacctaaaacagatatcagatgtggtctacagaaaatcaggaagttctctgaaaagcgtgcgagaactttgacggatttttttctttattttcctgaatttttttgacaattttgtcgaaccccaaacagaccgtaggtgagtttggccggcctcagaatggtgtcaactagctcctataaaaatttcagattttttggacacccgagcgaaaagttatgcccggtttacggaaggtacctcaagttatgttctaaaaacgaccgggatgaaacaaccgtatcctttctccttcgttatcttttttttctgtttttttgacgtaaccgaaggagaaaaacaaggaaggttgactcggtttgtttttttttgctgtttttttttcgtaaccgaaggagaaaatcaaggaaacggccgttgactcggtttgttttttctgtttttttttgacgtaaccgaaggagaaaaataaggaaacgatgttgactcggtttgtggtgtgatcaaatgggagatggtggcggcgctagggtttgaatggtggaagaacacaatgcaaccagcaacaaatgacgcgaaagcacacaaattcaacaatgcagattattgaaagaaagtgtgaggctcaaaagggtgctgggataagatctaacctgaatttttatgtggttttgtggactgtaggaaaaaaaacgctcgataaactcaccgatcaacctggaaatctgataccaattgatgaagctgaggtgcccgatctttcggcaagtagagataattccgatttggcggaagatgacccttgcgatccgactacgacgagcaagcccgaggcgccaatgcaatcgctgaaccaactccctgtggttaccgaccttgctgatgcgagatcggcctgatcacgaagatcgtttcctgtgcgcaatcgaagaacgaacaagaacaagatgcgagcaatctaatctattactcgagggtggagttctgaatacacgaagacagcgcagatttgcgcgtgttcgagagtagctaaggctaatgtaaaacaaaactcaggaaataaaggaggcgcagctcctgaataaatagagagggggcgcagcccctaggggcggccaaccctaggtcgtccattatgggccgcaattgggctggtcgtctattctttcgggccttcgttctttaacaacatgatgtagttcaattctcttgcacgggcccgagtcactggcccaggtggaaggggtggcgcctgggctggagaaggtgctgctggtgtagatgtgctcgtgttggtgttgatgtccgcatcacttgggttttgtttgatgtaagtttagcctttgctacttccttgtaaacgcgtgtgtcggctagaccacccgaatacttgaaacgggaccccaactttatcagatccgtgcgtgtttgcttgttatcttgttcttgcttgttctcgattgcttgcaggttcaaggctgttcttggcacggcaagagcagcaacaacaggagccggtgtaactatcgctaaggcgcagcacccttgtggttgttgtagtcggatagcacaacgtcgacctccaccccaaatcgtagttatcaggagatggtgtacctgtcgctcaaggcgccacaccatcttggttgtggtagtcgggcagccaacgtcgttctccaacaagttttccacctccatcatctctcatcgaaagatcgggcacccttctacccgttgggttcatcagttccggtggcaaaaactcgtgctttgtatgcaccatgacacccgttttcggaatgggtgagacgtgcgacaacgaaattgtgcgaaaccaccccaacacatgagttttggacctaaagtagtggattgggcatgttcgttgcaaaaaacaaagaaatggttccggtggcaaaaactcgtgctttgtatgcaccatgacacccgttttcggaatgggtgacgtgcgacaacgaaattgcgagaaaccaccccaaacatgagttttggacctaaagtactggattaggcatgttcgttgcgaaaaacgaagaaatggttccggtggcaaaaactcgtgctttgtatgcacccgacacccgttttcggaatgggtgacgtgcgacaacgaaattgtgtgaaaccaccccaaacatgagttttggacctaaagtagtggattgggcatgttcgttacgaaaaacgaagaaatggttccggtggcaaaaactcgtgcttttatgcaccccgatacccgttttcagaatgggtgacatgcgacaacaaaattgcgcgaaaccaccccaaacatgagttttggacctaaagtagtggattgggcatgttcgttgcgaaaaacgaaggaatggttccggtggcaaaaactcgtgcttttatgcaccccgatacccgttttcagaatgggtgacgtgcgacaacgaaactgtgcgaaaccaccccaaacatgagttttggacctatagtagtggattgggcatgttcgttgtgaaaaacgaagaaatggttccggtggaaaaaactcgtgctttgtatgcaccccgacaaccgttttcggaatgggtgacgtgcggcaacgaaattgcgcgaaaccaccccaaacatgagttttggacctaaagtagtggattgggcatgttcgttgcgaaaaacgaagaaatggttccggtggcaaaaactcgtgctttttattcacccgacacccgttttcggaatgggtgacgtgcgacaaagaaattgcgcgaaaccaccccaaacatgagttttggatgtaaagtagtggattgggcatgttcgttgtgaaaaacgaagaaatggttccggtggcaaaaactcgtgctttgtatgcacccgacacccgttttcggaatgggtgacgtgcgacaacgaaattgtgcgaaaccaccccaaacatgagttttggacctaaagtagtggattcggcatgttcgttacgaaaaacgaagaaatggttccggtggcaaaaactcgtgcttttatgcaccccgatacccgttttcagaatgggtgacgtgcgacaacaaaattgcgcgaaaccaccccaaacatgagttttggacctaaagtagtggattgggcatgttcgttgcgaaaaacgaagaaatggttccggtggcaaaaactcgtgcttttatgcaccccgatacccgttttcagaatgggtgacgtgcgacaacgaaactgtgcgaaaccaccccaaacatgagttttggacctatagtagtggattgggcatgttcgttgtgaaaaacgaagaaatggttccggtggcaaaaactcgtgctttgtatgcaccccgacaaccgttttcggaatgggtgacgtgcggcaacgaaattgcgcgaaaccaccccaaacatgagttttggacctaaagtagtggattgggcatgttcgttgcgaaaaacgaagaaatggttccggtggcaaaaactcgtgcttttatgcaccccgatacccgttttcggaatgggtgacatgcgacaacaaaattgcgcgaaaccaccccaaacatgagttttggacctaaagtagtggattgggcatgttcgttgcgaaaaacgaagaaatggttccggtggcaaaaactcgtgctttgtatgcacccgacacccgttttcggaatgggtgacgtgcgacaaagaaattgcgcgaaaccaccccaaacatgagttttggatgtaaagtagtggattgggcatgttcgttgcgaaaaacgaagaaatggttccggtggcaaaaactcgtgctttgtatgcacccgacacccgttttcggaatgggtgacgtgcgacaacgaaattgtgcgaaaccacaccaaacatgagttttggacctaaagtagtggattgggcatgttcgttacgaaaaacgaagaaatggttccggtggcaaaaactcgtgctttgtatgcacccccgacaaccgttttcggaatgggtgacgtgcggcaacgaaattgcgcgaaaccactccaaacatgagttttggacctaaagtagtggattgggcatgttcgttgtgtaaaacgaagaaatggttccggtggcaaaaactcgtgctttgtatgcaccccgacaaccgttttcggaatgggtgacgtgcggcaacgaaattgcgcgaaaccaccccaaacatgagttttggacctaaagtagtggattgggcatgttcgttgcgaaaaacgaagaaatggttccggtggcaaaaactcgtgctttgtatgcacccgacacccgttttcggaatgggtgacgtgcgacaaagaaattgcgcgaaaccaccccaaacatgagttttggatgtaaagtagtggattgggcatgttcgttgcgaaaaacgaagaaatggttccggtggcaaaaactcgtgctttgtatgcacccgacacccgttttcggaatgggtgacgtgcgacaacgaaattgtgcgaaaccacaccaaacatgagttttggacctaaagtagtggattgggcatgttcgttacgaaaaacgaagaaatggttccggtggcaaaaactcgtgcttttatgcaccccgatacccgttttcggaatgggtgatgatgaagacatccacactactgatgcatctataccaatacaagtaccaatttctggtcccattactcgcgctcgtgctcgtcaactcaaccatcaggtgattacactcttgagttcatgtccatcatatttagaccatggagacccgtgcactcttgttttgcttaggaatcagggagaagaccgaaagggaaaaggatttgaacatgctggattcggactgcagaagaacaccaacttgtgacggtcaccacggtcagatgcgggctcggattggaatgttcnngcncnncntggnnngcttntcnngtctnctttcntntggatccgganttatngtcntttctgttctgnggccgccgtnntcnttgttttcttnccgngncntttcctgccttttctgcccntggtgctgcgtcnccctnttttggcccantgggtcgtgtntcnngttnggtccnttngggncgcntcctngggttgcngcncgncccccntncccttgtggtcgtcctaaggtgtttntnnnccccctngccgtcnccnngcccccgaaatgtgtttagatcaagtttctttccagcagatggagcttcagcgaatcaagcttgattcatcaggag

SEQ ID NO: 66 - DNA, 10771 bp, Zea mays
cgtcctcatgatatcaagcttgattcgctgaagctccaatgtgctggaaagacgaagaaatggttccggtggcaaaaactcgtgctttgtgtgcacccgacacccgttttcggaatgggtgacgtgcgacaacgaaattgcgagaaatcaccccaaacatgagttttggacctaaagtagtggattgggcatgttcgttgcgaaaaacgaagaaatggttccggtggcaaaaactcgtgctttgtatgcaaccgacacccgttttcggaatgggtgacgtgcgacaacgaaattgcgcgaaaccaccccaaacatgagttttggatctaaagtagtggattgggcatgttcgttgcgaaaaacgaagaaatggttccggtggcaaaaactcgtgctttgtatgcacccgacacccgttttcggattgggtgatgtgcgacaacgaaattacgcgaaaccaccccaaacatgagttttggatgtaaagtagtggattgggcatgttcgttgcgaaaaacgaagaaatggttctggtggcaaaaactcgtgctttgtatgcaaccgacacccgttttcggaatgggtgacgtgcgacaacgaaattgcgcgaaaccatcccaaacatgagtttttggatctaaagtagtggattgggcatgttcgttgcgaaaaacgaagaaatggttccggtggcaaaaactcgtgcttttatgcaccccgatgcccgttttcagaatgggtgacgtgcgacaacgaaactgtgcgaaaccaccccaaacatgagttttggacctaaagtaatggattgggcatgttcgttgcgaaaaacgaagaaatggttccggtggcaaaaactcgtgctttgtatgcacccccgacaaccgttttcggaatgggtgacgtgcggcaacgaaattgcgcgaaaccaccccaaacatgagttttggacctatagtagtggattgggcatgttcgttgtgaaaaacgaagaaatggttccggtggaaaaaactcgtgctttgtatgcaccccgacaaccgttttcggaatgggtgacgtgcggcaacgaaattgcgcgaaaccaccccaaacatgagttttggacctaaagtagtggattgggcatgttcgttgcgaaaaacgaagaaatggttccggtggcaaaaactcgtgctttttattcacccgacacccgttttcggaatgggtgacgtgcgacaaagaaattgcgcgaaaccaccccaaacatgagttttggatgtaaagtagtggattgggcatgttcgttgcgaaaaacgaagaaatggttccggtggcaaaaactcgtgctttgtatgcacccgacacccgttttcggaatgggtgacgtgcgacaacgaaattgtgcgaaaccacaccaaacatgagttttggacctaaagtagtggattgggcatgttcgttacgaaaaacgaagaaatggttccggtggcaaaaactcgtgcttttatgcaccccgatacccgttttcagaatgggtgacatgcgacaacaaaattgcacgaaaccaccccaaacatgagttttggacctaaagtagtggattgggcatgttcgttgcgaaaaacgaagaaatggttccggtggcaaaaactcgtgcttttatgcaccccgatacccgttttcagaatgggtgacgtgcgacaacgaaactgtgcgaaaccaccccaaacatgagttttggacctaaagtagtggattgggcatgttcgttgtgaaaaacgaagaaatggttccggtggcaaaaactcgtgctttgtatgcaccccgacaaccgttttcggaatgggtgacgtgcggcaacgaaattgcgcgaaaccaccccaaacatgagttttggacctaaagtagtggattgggcatgttcgttgcgaaaaacgaagaaatggttccggtggcaaaaactcgtgctttttattcacccgacacccgttttcggaatgggtgacgtgcgacaacgaaattgcgcgaaaccaccccaaacatgagttttggatgtaaagtagtggattgggcatgttcgttgcgaaaaacgaagaaatggttccggtggcaaaaactcgtgctttgtatgcacccgacacccgttttcggaatgggtgacgtgcgacaacgaaattgtgcgaaaccaccccaaacatgagttttggacctaaagtagtggattcggcatgttcgttacgaaaaacgaagaaatggttccggtggcaaaaactcgtgcttttatgcaccccgatacacgttttcagaatgggtgacgtgcgacaacgaaactgtgcgaaaccaccccaaacatgagttttggacctaaagtagtggattgggcatgttcgttatgaaaaacgaagaaatggttccggtggcaaaaactcgtgctttgtatgcaccccgacaaccgttttcggaatgggtgacgtgcggcaacgaaattgcgcgaaaccaccccaaacatgagttttggacctaaagtagtggattgggcatgttcgttgcgaaaaacgaagaaatggttccggtggcaaaaactcgtgctttttattcacccgacacccgttttcggaatgggtgacgtgcgacaacgaaattgcgcgaaaccaccccaaacatgagttttggatgtaaagtagtggattgggcatgttcgttgcgaaaaacgaagaaatggttccggtggcaaaaactcgtgctttgtatgcacccgacacccgttttcggaatgggtgacgtgcgacaacgaaattgtgcgaaaccaccccaaacatgagttttggacctaaagtagtggattcggcatgttcgttacgaaaaacgaagaaatggttccggtggcaaaaactcgtgcttttatgcaccccgatacccgttttcagaatgggtgacgtgcgacaacaaaattgcgcgaaaccaccccaaacatgagttttggacctaaagtagtggattgggcatgttcgttgcgaaaaacgaagaaatggttccggtggcaaaaactcgtgcttttatgcaccccgatacccgttttcagaatgggtgacgtgcgacaacgaaactgtgcgaaaccaccccaaacatgagttttggacctaaagtagtggattgggcatgttcgttgtgaaaaacgaagaaatggttccggtggcaaaaactcgtgctttgtatgcaccccgacaaccgttttcggaatgggtgacgtgcggcaacgaaattgcgcgaaaccaccccaaacatgagttttggacctaaagtagtggattgggcatgttcgttgcgaaaaacgaagaaatggttccggtggcaaaaactcgtgctttgtatgcacccgacacccgttttcggaatgggtgacgtgcgacaaagaaattgcgcgaaaccaccccaaacatgagttttggatgtaaagtagtggattgggcatgttcgttgcgaaaaacgaagaaatggttccggtggcaaaaactcgtgctttgtatgcacccgacacccgttttcggaatgggtgacgtgcgacaacgaaattgtgcgaaaccacaccaaacatgagttttggacctaaagtagtggattgggcatgttcgttacgaaaaacgaagaaatggttccggtggcaaaaactcgtgcttttatgcaccccgatacccgttttcagaatgggtgacgtgcgacaacaaaattgcgcgaaaccaccccaaacatgagttttggacctaaagtagtggattgggcatgttcgttgcgaaaaacgaagaaatggttccggtggcaaaaactcgtgcttttatgcaccccgatacccgttttcagaatgggtgacgtgcgacaacgaaactgtgcgaaaccaccccaaacatgagttttggacctaaagtagtggattgggcatgttcgttgtgaaaaacgaagaaatggttccggtggcaaaaactcgtgctttgtatgcaccccgacaaccgttttcggaatgggtgacgtgcggcaacgaaattgcgcgaaaccaccccaaacatgagttttggacctaaagtagtggattgagcatgttcgttgcgaaaaacgaagaaatggttccggtggcaaaaactcgtgctttttattcacccgacacccgttttcggaatgggtgacgtgcgacaacgaaattgcgcgaaaccaccccaaacatgagttttggatgtaaagtagtggattgggcatgttcgttgcgaaaaacgaagaaatggttccggtggcaaaaactcgtgctttgtatgcacccgacacccgttttcggaatgggtgacgtgcgacaacgaaattgtgcgaaaccaccccaaacatgagttttggacctaaagtagtggattcggcatgttcgttacgaaaaacgaagaaatggttccggtggcaaaaactcgtgcttttatgcaccccgatacccgttttcagaatgggtgacgtgcgacaacaaaattgcgcgaaaccaccccaaacatgagttttggacctaaagtagtggattgggcatgttcgttgcgaaaaacgaagaaatggttccggtggcaaaaactcgtgctttgtatgcacccgacacccgttttcggaatgggtgacgtgcgacaacgaaattgtgcgaaaccaccccaaacatgagttttggacctaaagtagtggattgggcatgttcgttgcgaaaaacgaagaaatggttccggtggcaaaaactcgtgcttttatgcaccccgatacccgttttcagaatgggtgacatgcgacaacaaaattgcacgaaaccaccccaaacatgagttttggacctaaagtagtggattgggcatgttcgttgcgaaaaacgaagaaatggttccggtggcaaaaactcgtgcttttatgcaccccgatacccgttttcagaatgggtgacgtgcgacaacgaaactgtgcgaaaccaccccaaacatgagttttggacctatagtagtggattgggcatgttcgttgtgaaaaacgaagaaatggttccggtggcaaaaactcgtgctttgtatgcaccccgacaaccgttttcggaatggatgacgtgcggcaacgaaattgcgcgaaaccaccccaaacatgagttttggacctaaagtagtggattgggcatgttcgttgcgaaaaacgaagaaatggttccggtggcaaaaactcgtgctttttattcacccgacacccgttttcggaatgggtgacgtgcgacaacgaaattgcgcgaaaccaccccaaacatgagttttggatgtaaagtagtggattgggcatgttcgttgcaaaaaacgaagaaatggttccggtggcaaaaactcgtgctttgtatgcacccgacacccgttttcggaatgggtgacgtgcgacaacgaaattgtgcgaaaccaccccaaacatgagttttggacctaaagtagtggattaggcatgttcgttgcgaaaaacgaagaaatggttccgctggcaaaaactcgtgctttgtatgcactccgacacccttttcggaatgggtgacgtgtgacaacgaaattgcgcgaaaccacccaaacatgagttttgtacctaaagtagtggattgggcatgttcgttgcgaaaaacgaagaaatggttccggtggcaaaaacgcgtgctttgtatgcacccccgacaaccgttttcggaatgggtgacgtgcggcaacgaaattgcgcgaaaccaccccaaacatgagttttggacctaaagtagtggattgggcatgttcgttgcgaaaaacgaagaaatggttccggtggcaaaaactcgtgctttgtatgcacccgacacccgttttcggaatgggtgacgtgcgacaacgaaattgtgtgaaaccaccccaaacatgagttttggacctaaagtagtggattgggcatgttcgttacgaaaaacgaagaaatggttccggtggcaaaaactcgtgcttttatgcacctgacactcgttttcggaatgagtgacgtgcggcaacgaaattgcgcaaaaccacccaaaacatgagttttgtacctaaagtagtggattgggcatgttcgttgagaaaaacgaagaaatggttcctgtggcaaaaactcgtgctttgtatgcaaccccacacccgttttcagaatgggtgacgtgcggcatcgaaattgcgcgaaaccacccaaaacatgagttttggacctaaagtagtggattggcatgttcgttgcgaaaaacaaagaaatagttccggtggcaaaaactcgtgctttgtatgcaccatgacacccgttttcagaatgggtgacgtgcgacaacgaaattgtgcgaaaccaccccaaacatgagttttggacctaaagtagtggattgggcatgttcgttgcgaaaaatgaagaaatggttccggtggcaaaaactcgtgctttgtatgcacccgacacccgttttcggaatgggtgacgtgcgacaacgaaattgtgcgaaaccaccccaaacatgagttttggacctaaagtagtggattgggcatgttcgttgcgaaaaacaaagaaatggttccggtggcaaaaactcgtgctttgtatgcaccatgacacccgttttcggaatgggtaacgtgcgacaacaaaattgcgagaaaccaccccaaacatgagttttggacctaaagtagtgtattaggcatgttcgttgcgaaaaacgaagaaatggttccgctggcaaaaactcgtgctttgtatgcactccgacacccttttcggaatgggtgacgtgtgacaacgaaattgcgcgaaaccacccaaacatgagttttgtacctaaagtagtggattgggcatgttcgttgcgaaaaacgaagaaatggttccggtggcaaaaacgcgtgctttgtatgcacccccgacaaccgttttcggaatgggtgacgtgcggcaacgaaattgcgcgaaaccaccccaaacatgagttttggacctaaagtagtggattgggcatgttcgttgcgaaaaacgaagaaatggttccggtggcaaaaactcgtgctttgtatgcacccgacacccgttttcggaatgggtgacgtgcgacaacgaaattgcgcaaaaccaccccaaacatgagttttggacctaaagtagtggattgggcatgttcattgcgaaaaacgaagaaatggttccggtggcaaaaactcgtgctttgtatgcacccgacacccgttttcggaatgagtgacatgcgacaacgaaattgcgcgaaaccaccccaaacatgagttttggacctaaagtagtggattgggcatgttcgttgcgaaaaacgaagaaatggttccagtggcaaaaactcgtgctttgtatgcacccgacacccgttttcggaatgggtgacgtgcgacaacgaaattgcgcgaaaccacctcaaacatgagttttggacctaaagtagtggattgggcatgttcgttacgaaaaacaaagaaatggttccggtggcaaaaactcgtgctttgtatgcacccgacacccgttttcggaatgggtgacgtgcgacaacgaaattgcgagaaaccaccccaaacatgagttttggacctaaagtagtggattgggcatgttcgttgcgaaaaacgaagaaatggttccggtggcaaaaactcgtgctttgtatgcacccccgacaaccgttttcggaatgggtgacgtgcggcaacgaaattgcgcgaaaccactccaaacatgagttttggacctaaagtagtggattgggcatgttcgttgcgaaaaacgaagaaatggttccggtggcaaaaactcgtgctttttattcacccgacacccgttttcggaatgggtgacgtgcgacaacgaaattgcgcgaaaccaccccaaacatgagttttggatgtaaagtagtggattgggcatgttcgttgcgaaaaacgaagaaatggttccggtggcaaaaactcgtgctttgtatgcacccgacacccgttttcggaatgggtgacgtgcgacaaagaaattgcgcgaaaccaccccaaacatgagttttggatgtaaagtagtggattgggcatgttcgttgcgaaaaacgaagaaatggttccggtggcaaaaactcgtgctttgtatgcacccgacacccgttttcggaatgggtgacgtgcgacaacgaaattgtgcgaaaccaccccaaacatgagttttggacctaaagtagtggatttggcatgttcgttacgaaaaacgaagaaatggttccggtggcaaaaactcgtgcttttatgcaccccgatacccgttttcagaatgggtgacgtgcgacaacaaaattgcgcgaaaccatcccaaacatgagttttggacctaaagtagtggattgggcatgttcgttgcgaaaaacgaagaaatggttccggtggcaaaaactcgtgcttttatgcaccccgatgcccgttttcagaatgggtgacgtgcgacaacgaaactgtgcgaaaccaccccaaacatgagttttggacctaaagtaatggattgggcatgttcgttgcgaaaaacgaagaaatggttccggtggcaaaaactcgtgctttgtatgcacccccgacaaccgttttcggaatgggtgacgtgcggcaacgaaattgcgcgaaaccaccccaaacatgagttttggacctaaagtagtggattgggcatgttcgttgcgaaaaacgaagaaatggttccggtggcaaaaactcgtgctttttattcacccgacacccgttttcggaatgggtgacgtgcgacaacgaaattgcgcgaaaccaccccaaacatgagttttggatgtaaagtagtggattgggcatgttcgttgcgaaaaacgaagaaatggttccggtggcaaaaactcgtgctttgtatgcacccgacacccgttttcggaatgggtgacgtgcgacaacgaaattgtgcgaaaccaccccaaacatgagttttggacctaaagtagtggattcggcatgttcgttacgaaaaacgaagaaatggttccggtggcaaaaactcgtgcttttatgcaccccgatacccgttttcagaatgggtgacgtgcgacaacaaaattgcgcgaaaccaccccaaacatgagttttggacctaaagtaataaagttgggcatgttcgttgcgaaaaacgaagaaatggttccagtggcaaaaactcgtgctttgtatgcacccgacacccgttttcggaatgggtgacgtgcgacaacgaaattgcgcgaaaccacctcaaacatgagttttggacctaaagtagtggattgggcatgttcgttacgaaaaacaaagaaatggttccggtggcaaaaactcgtgctttgtatgcacccgacacccgttttcggaatgggtgacgtgcgacaacgaaattgcgagaaaccaccccaaacatgagttttgtacctaaagtactggattaggcatgttcgttgcgaaaaacgaagaaatggttccggtggcaaaaactcgtgctttgtatgcacccgacacccgttttcggaatgggtgacgtgcgacaacaaaattgtgtgaaaccaccccaaacatgagttttggacctaaagtagtggattgggcatgttcgttacgaaaaacgaagaaatggttccggtggcaaaaactcgtgcttttatgcacctgacactcgttttcggaatgagtgacgtgcggcaacgaaattgcgcaaaaccacccaaaacatgagttttgtacctaaagtagtggattgggcatgttcgttgagaaaaacgaagaaatggttcctgtggcaaaaactcgtgctttgtatgcaaccccacacccgttttcagaatgggtgacgtgcggcaacgaaattgcgcgaaaccacccaaaacatgagttttggacctaaagtagtggattggcatgttcgttgcgaaaaacaaagaaatagttccggtggcaaaaactcgtgctttgtatgcaccatgacacccgttttcagaatgggtgacgtgcgacaacgaaattgtgcgaaaccaccccaaacatgagttttggacctaaagtagtggattgggcatgttcgttgcgaaaaactaagaaatggttccggtggcaaaaactcgtgctttgtatgcacccgacacccgttttcggaatgggtgacgtgcgacaacgaaattgtgcgaaaccaccccaaacatgagttttggacctaaagtagtggattgggcatgttcgttgcgaaaaacaaagaaatggttccggtggcaaaaactcgtgctttgtatgcaccatgacacccgttttcggaatgggtgacgtgcgacaacgaaattgtgcgaaaccaccccaaacatgagttttggacctaaagtagtggattgggcatgttcgttgcgaaaaacgaagaaatggttccggtggcaaaaactcgtgctttgtatgcacccgacacccgttttcggaatgggtgacgtgcgacaacgaaattgtgcgaaaccacccaaaacatgagttttgtacctaaagtagtggattgggcatgttcgttgagaaaaacgaagaaatggttccggtggcaaaaactcgtgctttgtatgcacccgacacccgttttcggaatgggtgacgtgcggcaacgaaattgcgcgaaaccacccgaaacatgagtttctttccagcacatggagctcagcgaatcaagcttgattctcagggcc

SEQ ID NO: 67 - DNA, 15540 bp, Zea mays
ccgaaatctagaatcatcgccactgctgcatggaagatgaacatattaggtctttaatcgtctctaatccaaagattttgtagtcaagttgattcagcaaagtatatctcctagacaaagcgtcagcaatgatattctcttttcctttcttgtgcttaataacataaggaaacgattcgataaattcaacccacttagcatgtctacggttcagttttccttgactacgaatatgtttcaaagattcatgatcagaatgaataacaaactctttgggccacaaataatgctgccatgtttctaatgttcgcacaagagcatataattccttatcataagtagaataatttagaacagacccactcaatttttcactaaaatatgcaacaggtttgccttcttgtaacaaaacaccacccaatccaattccactagcatcacattcaagctcaaaagtcttattaaaatcaggaagttggaggagaggtgcatgtgtcaacttatctttcagcacgttgaaagcgtgctcttgtactttgccccaactaaaatgcactcccttcttcgtaagctcattcaaaggtgcagcaatggtgctaaagtccttcacaaaacggcgatagaagccagcaagtcctaggaaactccgcacctgtgtgatagtctttggcataggccatccatgtatcgcttctaccttggcttgatcaacctcaattccctgtggagtcacaacataaccaagaaacgaaactcgatcggtgcaaaatgtgcacttctcaaggttaccaaataaacgtgcatctcgtaaagcattaaaaacagcacgcatgtgatcaacatgttcatccatagatttgctgtagatcaatatatcatcaaagtatactaccacaaattttccaatgaaggcacgcaaaacctcgttcattaatctcatgaaagtgctaggtgcattagttaacccaaaaggcatgactaaccactcatacaatccgaacttagttttgaaagcagttttccattcatctcccaatttcatacgaatctggtggtacccactacgcaaatcaactttagaaaagacaatggcaccactcaattcatcaagcatatcatctaaacgtggaatagggtgtcgataacgtatggtgatattattaatagccctacaatcaacacacatacgccatgttccatctttcttaggcactaaaataaccggaacagcacacggactaagagactcacgcacgtaacctttgtcgagtagttcttgcacttgtcgctgaatttcttttgtttcctctggatttgtcctatatggcgcacgattcggcaaagatgcaccaggaataagatcaatttggtgctcaatccctcgtataggtggcagcccctctggtatctcacttggaaatacatcagaatactcctgcaaaatgttagtaataacaggaggcaaagaatgctgcatatcttgaattgaaatcaaaacatccttgcataccaaggcgtaggcaacagtagtggaagcaaataattcattaacatcagtttttgttgcaagcaagcaatgtcctttcaattttatcccatctttgttattaccaacagctttaatattcttgttgttctcagttttagctttggtagctttagcaacatcatcacacacaatagcctcaggggacatgggaagcaaaataattttcttatcatggtgtatgagagaatatttatttgatctaccatgatgcatacaatctgaatcaaattgccatggtctacctagcagaatattacaagcatccataggcacaacatcacagtcaacaacatcacgatatgaaccaatagcaaaattaattcgtaccagcttggttaccttgaccttaccactattgttaagccattgaatgtgatatggatgcgggtgcggtttggtcgtaagtgcaagcttctccaccatgtcgctgctagccaagttgttgcagctacctccatcaatgatcaaacgacatgaacgctccttaatgacacactttgtttgaaacaacgtatgtcgctgattctgctctgccttctccatttgtgcactaagcacacgctgtacaatgaggctctcataatgctctgcatcatctgcaccaatctgttcttcgggtggttccttagtgcctgcatcatcagccgcaagcaaagcaagtgtagcttcatccaaatcactagcagaggaatacccaccatcgtcttttaccaccaaaacacgctgattaggacaatcacgctgcacgtgtccatagcccttgcatcgataacacagaacatctcttgttctacccgtggaggctactgaagaggcactacctgctggtttctgggcagatttggttgctgaatttgtggaagatgcacgtggtttgtcgccggaggaaggcgggggtgctggtcgacttggcgagggagttggtgctggtgtacggccggtcatggacgtagtcgtgcgctgttgccatggtgtagattttcctgcagaaacattagaccttgcactagcacgtcgtccctgcacttccctttcagctttgcaagcaagatgaaacaatcgggttacattagcataatctttataagcaaggatgtcctgaatttccctatttaacccgcccaaaaatctagccatagcagattcctcacactcctctatgttacaacgcaacatacccatttgtaattcctgataatattcttctacacttttagtaccctgtctcaattgttgcaacttgtttaacatatcacgtgcataataagaaggaacaaatctagcccgcatgacccgtttcaacgcatcccaagtttgtggcatgttattaggattcttcttaccatgttctatccaccaaacagaagcaaattcagtaaactcactagtagcagctctaacccgcacattctcaggaaattcatggcatgcaaacttttgatcaaccgcaatctcccaagtaatgtaagcatcagggtcatatttaccatcaaaaggaggtattttaaatttaaccttactaaaagcatcatcattaccatgtacctcacgtcggtgaaaaccacccatacctctacggttagtacgtagtcgccggcgattaggtgcttcttggtcatcttgttcagtatcagcaacatagtcatcccagttaccttcggcgccctcatcacgcccaccattgatattagcatgcatctcatcaaaccgcctcaagagtgcgacaaggctcttgtcaatatgagcaactgtcatttccacatttgcaagtttggtgttcgtgtcgatctgtgtggcctccaattgccccatcttttcattcgtcacctgcatgtcattatcaagaccttccgtgtgcgtcttcactagccttacaaagtgttgtatgatacccttggtgcgaggagagtgtggcatattacgagaagcatcatcaacctccaatcctgccatggttagacgaacagaggcaacaagaaaaaaaaacgtgaaggaatgaaaactctacaactattaggatgtagctactgcaaggcgctcactctcaacctgccacacaagctcttaccaattcttaccttgcacaacaggaggggtcagcaaccaacaagtctgcaaccgtggaataagtgtatcggtgccgcagcaacacgacctgtcaaactgtagtcgaaatatgtagagttgtaggtgggctgaagcaaggaatacactagtaccacgttagttacaaaagcaagctgaataatcgttcaacggtggtactgtgctggtcctaggctaaaccaggttagagacgtgagcctaggcacaaaggtagtcactgaaaaagaacaactagcacagcacaaagagaaacaacagatttagagattcagcccccttcttcttcttttcctttttttttctattctttttttttcttcttcttcttctgtttttttttgcaggggcttaaacccttttttcactatgacaacccaaacaataaagatattgctaacagcccctttaaatcagatttaacaaatcttgttaatatagaaagtccagaaatctctacgatgattgcggagcgctcagaacgaattttgagataaggtcagatccgttggaaagaagataagataagctttctagattgtatttaaacttccaaatcggatatgatatgtatccgtggtggcaaaaacgaaccagatatgtttttggtgatggtggatctcgtggtgaccaaaacgtggtagaactcaaaactctaaaggaataaactaagaccagcaactcgacacaaccgatgcaaccaaaaactcaacaagccctaactaagtagtactagtaaatgctcaatggtttataggattgcggtaaaactaatctactatttttttggctttttctggactataggagataagaaaacagcgaagaaaagtaaatctctcaccgataaaccttgctctgattaccaactgatgtgcacccgttgggtgattgcccgatctttcgatgagagggtgtggaataactcgattgggggaggagacgacgttcacggcccgactacagccttccaaagacgctgcgccttagcaaccgatacaccacctcctatggctgtcacgatcttgtggagcgtgacaccctggccactagggcactcgtcctgcaagcaatcgaagaactagcaagaacaagtagaacaagtactgaattaccagatctaaatgtaggtttaaagatcaaactacaatatggtggggttccgaagacaagaagacgggcggctgaactagcacgcgcgcttgcaagcaagtagcgagagctaaacttgatctaaacaaaacccgctgttcttggtggcagctagggggtttataaacatgggaggacgaccacaagggtattggggtcgtgctgcaaccctaggatgcgtccctaatggacctaacttgatacacgacccattgggccaaaatagggtgacgcagcaccatgggcagaaaaggcaggaaatgtctcggtaataaaacaatgattacggcggcctcagaacagatatgactataattccggatccatatgaaagtagacttgataagctttccatgttgtgcttgaacattccaatccgagcccgcatctgaccgtggtgaccgtcacaagttggtgttcttctgcagtccgaatccagcatgttcaaatccttttccctttcggtcttctccctgattcctaagcaaaacaagagtgcacgggtctccatggtctaaatatgatggacatgaactcaagagtgtaatcacctgatggttgagttgacgagcacgagcgcgagtaatgggaccagaaattggtacttgtattggtatagatgcatcagtagtgtggatgtcttcatcattcagtgccatcgttgtagagggtttgggcatatgattcgggactgcccaaacaagcgtaccttgcttatacgtgacaatggtgagtactcttcagccagtgattctgaggaaactagtcatgctatgattgccactaaccatgcagaaaatgaggaagtccacgttgatcctatcgacgccgataggtatgagagtcttgttgtgcagcgtgttctcagcacacaggttgcccaggccgaaaaaaatcagcgacacactctattccataccaagggcgtcgtgcacgaacggtcgattcgcatcatcatcgatagtggcagctgcaacaatttggcaagtacagcgttggtagagaaattatccttgcccactcgcacacatccacatccgtatcacattcaatggcttaatgatggtggtaaaataaaggtaacacgttcggtacgtgtccccttttcgctgggttcttattctgattatgctgattgcgatgttattcctatggaagcatgctctttgttattaggtcgaccttggcaatatgatactgatagtttacatcatggtcgttcaaatcattattctttcatgtttaaaggccagaaaataattatacatccaatgacccctgaccaaattttgaaagatgatcttactagggctgctaaaactgcacaacaagtcaaatcgacatcagccgcacctattaaatctgaaatcaagttgcactctcctgttttacttgctacacgtgctgattttgatgatctccatgaagctcatatgccctgttatgcacttgtatgctcgcgaatgattgttccgcttgatgatgcaacgtctttggatataccccctgctgttgttaaccttttgcaggagtatgctgatgtttatcctacggacttaccaccgggtcttcctcccctccgtggcattgagcatcagatcgatctcatccccggcgcttctcttccgaaccgcgccccgtaccgtacaaatccagatgagacgaaggagatccagcgccaggtgcagacgctgcttgataagggttacattcgtgagtctcttagcccttgctcggttcctgttttactcgtcccaaagaaagatgggtcatggcgtatgtgcgtagattgtcgtgctattaataacatcacagttcgttatcgatatcctattccacgccttgatgatatgctagatgagcttagtggtgccgttattttctctaaggttgatttgcgtagcggttaccatcagattagaatgaaactcggtgatgaatggaaaacggcttttaaaacgaaatttggtttatatgaatggttggttatgccatttggattgactaatgctcccagcacctttatgcgtttaatgaacgaagttctacgggccttcataggtttgtttgttgttgtttatttcgatgatatccttatttacagcaagtctatagaggagcatttagaacatttgcgtgctgtttttgacgctttgcgtgctgctcgcttgtttggtaacatggaaaagtgcacattttgcacgcaacgtgtctcgtttcttggttatgtggttactccgcagggcattgaggtggatagcagcaagattgctgccattcgggagtggcctacaccgacgacggtcacacaaattcggagctttcttggacttgccggtttctaccgcagatttgttcgtgattttagctccattgcagcgcctctacatgagcttacaaagaaagatgtgccgtttgcttggagtgattcgcaggaggtagcgttcagcactttgaaagataagttaacccaagctcccctattgcaattgcctgattttaataaagtgtttgagcttgaatgcgatgctagcggtattgggctaggtgctgttttgttacaagaaggaaaaccagttgcttattttagtgaaaaattaagcggtgctagtctgaaatattctacttatgataaggagctttacgctttagtgcgcactttgcatacatggcagcactatctttggcatcgtgagtttataatccattctgatcatgaggctttaaaacatattcgtacccaaacaaatctgaaccgtcgtcatgctaaatgggtagaattcattgagtcctttccttacattattaaacacaagaacgggaaggacaatgttattgctgatgctttgtctcgtcgctataccatgctgtcacagttagattttaaaatctttggtttggacactgtgaaggatcaatatgttgacgatgctgattttaaagatgctttcggtcattgtattaatgggaaaccatggggcaaatttcacatacaggatgggttcctgtttcgcgctaacaagctgtgtgttccagctagctcggttcgtcttttgttgttacaggaagcgcatggaggcggtctcatggggcatttcggcctctacaagacacatgaggttttggctgcccatttcttttggcctcggatgcgcgctgatgtggagcgccttgttgcacgctgcactacttgtcagaaagctaagtcacggttgaacaaccatggtttgtatatgcctttgcctgtcccttcttctccttggcttgatatctctatggactttgttttgggcttgcctagaactaagaaggggagggatagtatttttgtggttgttgatagattctctaaaatggctcactttataccttgtcataaaactgatgatgctagcattgttgctgaattgttctttagagaaattattcgtttacatggtattccaaaaacaatagtctctgatcgcgatgctaagtttctaagccatttttggagatctctttggaataaattgggaactaaattgttgtttagcactacttgtcaccctcagactgatggacaaactgaggtagtaaatagaactttatctaccatgcttagggctgttttagacaagaatttgagacgttgggaggattgcttgcctcatgttgaatttgcttacaatcatgccacgcattcttctacaaagatgtgccctttccagattgtttatggttacattcctagggcacctattgatttgatttcacttaatgctgcgaacgccccacatgtagatgcttctgcacatgttgaacaaatgattaccatacatgaacaaacgaaacagaacattgctgctactaatacaaaaaatcaggttgctggtagtaaaggaagaaaacatgttacttttgaacctggtgatatggtttggttgcatttgagaaaggatcgttttcctactttgcgccgttctaaattgatgcctcgtgctgctggtccttttaagatactaaccaagattaatgataatgcttataccctcgacctacctgcggagtttggtgtttccactagttttaatgttgcagatttgaaaccgtatgcgggagaagatgaggagttgccgtcgaggacgacttcagttcaagaaggggaggatgatgcggacatcaacaccaacacgagcacatctacaccagcagcaccttctccagcccaggcgccaccccttccacctgggccagtgactcgggcccgtgcaagagaattgaactacatcatgttgttaaagaacgaaggcccggaagaatagacgaccagcccaattgcggcccataatggacgacctagggttggccgcccctaggggctgcgccccctctctatttattcaggagctgcgcctcctttatttcctgagttttgttttacattagccttagctactctcgaacacgcgcaaatctgcgctgtcttcgtgtattcagaactccaccctcgagtaatagattagattgctcgcatcttgttcttgttcattcttcgattgcgcacaggaaacgatcttcgtgatcaggccgatctcgcatcagcaaggtcggtaaccacagggagttggttcagcgattgcattggcgcctcgggcttgctcgtcgtagtcggatcgcaagggtcatcttccgccaaatcggaattatctctacttgccgaaagatcgggcacctcagcttcatcaccaagttctttggtggctgctagttgcttaaatagagaaataggaagaaggaattctggtggagtcatgaagttccctcggcagtttctggacgcctcgggtgtagtctcccattaattcttgatccaccagcaagtagacgaagggagctttccaacaagtatttatttgcattaaacggccttggaagttggaagatatgccccatttaaacttgtatttggtgctgttacgaaatcctctcgggtgcagcagcctttattgccttgttgccttctccagtccaagatggttcacctcccaaacacctgagcataataaagtcatcgcaaggctttagtacctcatttaaagaagaattagcttcaatagcaaagaacgagttcacctgataattaagtttacgtgcacgggctcgtgtcattggtccttgattagctacgaatggtgaagtggtcactggtatggttgtatcaatgatagtgatgtcctcatcatcctccccttcttgcaacaaagtcgtcctcgactcaaacgtgtcattctctcccaagtatggtgttaaatctgcaatgttaaaagaggaactcaccccaaaatctgcaggcaactgaactttatatgcattatcattaattttgtgaagcactttgaagggtccagcagctcttggttgtaatttagatttgcgcatatcagggaatctatctttccttaaatgcacccatactaaatcaccaggttcaaaggtaatatgctttctacccttgctacctgcttcttcatacttagcattcatggctttaatatttgctttagtttgttcatgcagctttataatcagttcagcacgacgagaagcatcaaaattcattatttcagaatgtgggatggcgataagatcaataggagcacgagggacaaaaccatacacaattttaaaagggcatagtttagttgtagaatgctgagaacgattataagcaaattcaatgtgaggcaaacattcttcccacaatttgatgttatgtttcagaacagccctaagcatggtagataaactacggtttacgacttcggtttgtccatcggtttgagggtgacaagtagtagaaaagagcaatttagttcccaacttagcccataacgttttccaaaaatgactaagaaatttggtatcccgatcggacacaatagtgtttggaaccccatgcaaacgaacaacttcacgaaagaacaaatcagcaacatgggtagcgtcatcagttttgtgacatggtataaagtgtgccatttttgaaaatctgtccacaacaacaaaaatactatccctccccttctttgttctaggtattcctaaaacaaagtccatagaaatatcctcccatggtgcactgggaactgggagaggcatgtataaaccatgtgaattaaggcgagacttagctttttgacatgtagtgcagcgagcaacaaatcgctccacgtctcttctcatcttcggccaaaagaaatggctggccaggatgtcttatgtcttcttcacaccaaagtgtcccatcaacccaccgccatgtgcttgctgtaataataatatacgcacggaaccagctggaatgcataatttgttagcccgaaacacaaagccatcagtgagaacaaatttgttccatgtccttccttctttacaatgtaatagcacatctttgaaatcagcatcgaaaacatattcttgtttaattgtttccaagccaaaaatcttaaaatcaagttgagacagcatggtataacggcgagacaaggcatctgcaatgacattatcttttcctttcttatgtttgatgacatagggaaaagattcaataaattcgacccacttggcatgcctacggttcagatttgtttggctccttagatgctttaaagattcatgatcagaatgtataacaaattctttaggccataagtagtgttgccatgtttccaaagttcgaactaaggcatataattctttatcataagtggaatagttcagactgggtccattcagtttctcactaaaataagcaacaggcttcccttcttgcaacaagacaccacccaaaccaataccactagcatcacattccaattcaaaagtcttactaaaatcaggtaattggagaaggggtgtatgagttaacctatccttcaatgtttcaaatgcaacctcttgtgccttgccccaagaaaaaggagcacccttcttagtaagctcgtgcaatggccctgcgatggtgctgaaatctttcacaaatcgacgatagaaccccgcaagcccgagaaagcttcggacttgcgtgaccgtggtagggactggccagctatgtatggcctccaccttagcctgatcaacttcaattccctgcggtgtcacaacatagccaagaaaagagacacggtctgtgcaaaatgtgcacttgtcaaggttatcaaataagcgtgcttcacgtaaagcattgaaaacaacacgtagatgatcaagatggtctactagacatttgttatagatccccgggtaccgagctcgaattcgccctatagtgagtcgtattacaattcactggccgtcgttttacaacgtcgtgactgggaaaaccctggcgttacccaacttaatcgccttgcagcacatccccctttcgccagctggcgtaatagcgaagaggcccgcaccgatcgcccttcccaacagttgcgcagctgaatggcgaatggcgcctgatgcggtattttctccttacgcatctgtgcggtatttcacaccgcatatggtgcactctcagtacaatctgctctgatgccgcatagttaagccagccccgacacccgccaacacccgctgacgcgaaccccttgcggccgcatcgaatataacttcgtataatgtatgctatacgaagttatggcgcgccaccggtgggatccaaacagtcacttaggatatgtttggaagcacaccgacatgtttggaagcacaccagttttaaaaaactattttctatcctcactttcttgaaaatgttttatgaaaaaaattgggtggggtgtttggaacctagtttctagtttttttataaggagaatagcttcttggttttagttatgggagagtagcttcttggtttttaagaaactaagaatccagtttttataaactgagacataaacaagtatatttggaatcactctagtttgtacaaaccaatttcttagaaattggatgcttataaataggccctcaatgtccttgttgggtttatgaaatttacatctattaccattattttaaaaatagacgaagaatatgttagtaattatgtataaaaaactagaaactattttaaaaaaaactgagttccagttacctttatctaattcttttataagctaatttttagacactgaggatagaaactgtttttaaaaaactggtgtgcttctgtttaactcttcgtaagaacagtggtacgtcccgtgtctatatttggcttttgttaaagccaacagtacatgcttgcgtgggtgaaaatgtgaaatgccatcgctgtgctacaacttttcggctccctcctgcttcggtgcttccacatgcccctgcacggcgtctagaaatcctaatgatttagcagcacacctgtccgcctagccgcctacgcgtacacagaaaacaatttttttgtccacacacgcgcgcgctccgagccgcagatccgagctagcgcggcgcatccgacggccacgacagcgcagtgccgtcctccgccgccaccgcttggcgattgtccgcaccccaccagtccaccacctcccccacgagcgaaaaccacggtccacggaccacggctatgttccactccaggtggaggctgcagccccggtttcgcaagccgcgccgtggtttgcttgcccacaggcggccaaaccgcaccctccttcccgtcgtttcccatctcttcctcctttagagctaccactatataaatcagggctcattttctcgctcctcacaggctcatctcgctttggatcgattggtttcgtaactggtgagggactgagggtctcggagtggattgatttggggttctgttcggagatttgcggagggaggccttggtaccggtgatcaagtgcaaaggtccgccttgtttctcctctgtctcttgatctgactaatcttggtttatgattcgttgagtaattttggggaaagcttcgtccacagttttttttcgatgaacagtgccgcagtggcgctgatcttgtatgctatcctgcaatcgtggtgaacttatttcttttatatcctttactcccatgaaaaggctagtaatctttctcgatgtaacatcgtccagcactgctattaccgtgtggtccatccgacagtctggctgaacacatcatacgatctatggagcaaaaatctatcttccctgttctttaatgaaggacgtcattttcattagtatgatctaggaatgttgcaacttgcaaggaggcgtttctttctttgaatttaactaactcgttgagtggccctgtttctcggacgtaaggcctttgctgctccacacatgtccattcgaattttaccgtgtttagcaagggcgaaaagtttgcatcttgatgatttagcttgactatgcgattgctttcctggacccgtgcagctgcggtggcaagggaggccggcaagcgctagcgctaccggtcgccaccatggcctcctccgagaacgtcatcaccgagttcatgcgcttcaaggtgcgcatggagggcaccgtgaacggccacgagttcgagatcgagggcgagggcgagggccgcccctacgagggccacaacaccgtgaagctgaaggtgaccaagggcggccccctgcccttcgcctgggacatcctgtccccccagttccagtacggctccaaggtgtacgtgaagcaccccgccgacatccccgactacaagaagctgtccttccccgagggcttcaagtgggagcgcgtgatgaacttcgaggacggcggcgtggcgaccgtgacccaggactcctccctgcaggacggctgcttcatctacaaggtgaagttcatcggcgtgaacttcccctccgacggccccgtgatgcagaagaagaccatgggctgggaggcctccaccgagcgcctgtacccccgcgacggcgtgctgaagggcgagacccacaaggccctgaagctgaaggacggcggccactacctggtggagttcaagtccatctacatggccaagaagcccgtgcagctgcccggctactactacgtggacgccaagctggacatcacctcccacaacgaggactacaccatcgtggagcagtacgagcgcaccgagggccgccaccacctgttcctgagatctcgagctgatccaaaaaagaagagaaaggtagatccaaaaaagaagagaaaggtagatccaaaaaagaagagaaaggtaggatccaccggatctagataactgatcataatcagccataccacatttgtagaggttttacttgctttaaaaaacctcccacacctccccctgaacctgaaacataaaatgaatgcaattgcagcgcttgagctctcctaggtccgcggaggcaatgccagcctgccctttcgatgaggaggtacatacacgctggcgatggaccgcgcttgtgtgtcgcgttcagtttggcttttgccaagcagtagggtagcttcccgcgtcggtaattatatggtatgaaccatcaccttttggctctacatggtatgaacgtaagatacaaattccaactacctctagctcgccgcactagttcctgcaggttggcccacgtggcctctcgagtgtttaaactcggaccgtatcgatttattcaacaaagccgccgtcccgtcaagtcagcgtaatgctctgccagtgttacaaccaattaaccaattctga

SEQ ID NO: 68 - DNA, 14443 bp, Zea mays
ggaagctttccagcaatttcgttgccgcacgtcactcattccgaaaacgagtgtcaggtgcataaaagcacgagtttttgccaccggaaccatttcttcgtttttcgtaacgaacatgcccaatccactactttaggtccaaaactcatgtttggggtggtttcacacaatttcgttgtcgcacgtcacccattccgaaaacgggtgtcgggtgcatacaaagcacgagtttttgccaccggaaccatttcttcgtttttcgcaacgaacatgcctaatccagtactttaggtccaaaactcatgtttggggtggtttctcgcaatttcgttgtcgcacgtcacccattccgaaaactggtgtcatggtgcatacaaagcacgagtttttgccaccggaaccatttctttgttttttgcaacgaacatgcccaatccactactttaggtccaaaactcatgtgttggggtggtttcgcacaatttcgttgtcgcacgtctcacccattccgaaaacgggtgtcatggtgcatacaaagcacgagtttttgccaccggaaccatttctttgtttttcgcaacgaacatgcccaatccactactttaggtccaaaactcatgtttcgggtggtttcgcgcaatttcgttgccgcacgtcacccattccgaaaacgggtgtcgggtgcatacaaagcacgagtttttgccactggaaccatttcttcgtttttctcaacgaacatgcccaatccactactttaggtacaaaactcatgttttgggtggtttcacgcaatttcgttgccgcacgtcactcattctgaaaacgagtgtcgggtgcataaaagcacgagtgtttgccaccggaaccatttcttcgtttttcgcaacgaacatgcccaatccactactttaggtccaaaactcatgtttgaggtggtttcgcgcaatttcgttgtcacacgtcacctattctgaaaacgggtatcggggtgcataaaagcacgagtttttgccaccggaaccatttcttcgtttttcgtaacaaacatgcccaatccactactttaggtcgtttcgcacaatttcgttgtcgcacgtcacccattccgaaaacgggtgtcatggtgcatacaaagcacgaatttttgccaccggaaccatttcttcgtttttcgcaacgaacatgcccaatccactactttaggtccaaaactcatgtttggggtggtttcgcacaatttcgttgtcgcacgtcacccattctgaaaacgggtgtcatggtgcatacaaagcacgagtttttgccaccggaaccatttctttgtttttcgcaacgaacatgcccaacccactactttaggtccaaaactcatgtttggggtggtttcgcgcaatttcgttgtcgcacgtcacccattccgaaaacgggtgtcgggtgcatacaaagcacgagtttttgccaccggaaccatttcttcgtttttcgcaacgaacatgcccaatccactactttaggtccaaaactcatgtttggggtggtttcacgcaatttcgttgtcgcacgtcacccattccgaaaacgggtgtcgggtgcatacagagctcgagtttttgccaccggaaccatttcttcgtttttcgcaatgaacatgcccaatccactactttaggtccaaaactcatgtttggggtggtttcgcgcaatttcgttgtcgcacgtcacccattccgaaaacgggtgtcgggtgcatacaaagcacgagtttttgccaccggaaccatttcttcgtttttcgcaacgaacatgcccaatccactactttaggtccaaaactcatgtttggggtgatttctcgcaatttcgttgtcgcacgtcacccattccgaaaacgggtgtcgggtgcatacaaagcacgagtttttgccaccggaaccatttcttcgttttttgtaacgaacatgcccaatccactactttaggtccaaaactcatgtttggggtggtttcgcgcaatttcgttgtcacgcgtcacccattccgaaaacgggtgtcggagtgcatacaaagcacgagtttttgccaccggaaccatttctttgtttttcgcaacgaacatgcccaatccactattttaggtccaaaactcatgtttggggtggtttcgcacaatttcgttgtcgcacgtcacctattccgaaaacaggtgtcatggtgcatacaaagcacgagtttttgccaccggaaccatttcttcgtttttcgcaacgaacatgcccaatccactactttaggtccaaaactcatgtttggggtggtttcgaacaatttcgttgtcgcacgtcacccattccgaaaacgggtgtcatggtgcatacaaagcacgagtttttgccaccggaaccatttctttgtttttcgcaacgaacatgcccaatccactactttaggtccaaaactcatgtttggggtggtttcgcgcaatttcgttgccgcatgtcacccattccgaaaacgggtatcggggtgcataaaagcacgagtttttgccaccggaaccatttcttcgtttttcgcaacgaacatgcccaatccactactttaggtccaaaactcatgtttggggtggtttcgcgcaatttcgttgtcgcacgtcacccattccgaaaacgggtgtcgggtgcatacaaagcacgagtttttgccaccggaaccatttcttcgtttttcgtaacgaacatgcccaatccactactttacatccaaaactcatgtttggggtggtttcgcgcaatttcgttgtcgcacgtcacccattccgaaaacgggtgtcgggtgaataaaaagcacgagtttttgccaccggaaccatttcttcgtttttcgcaacgaacatgctcaatccactactttaggtccaaaactcatgtttggggtgatttcgcacaatttcgttgtcgcacgtcacccattccgaaaacgggtgtcgggtgcatacaaagcacgagtttttgccaccggaaccatttcttcgttttttgtaacgaacatgcccaatccactactttaggtccaaaactcatgtttggggtggtttcgcgcaatttcgttgtcgcacgtcacccattccgaaaacgggtgtcgggtgaataaaaagcacgagtttttgccaccggaaccatttcttcgtttttcgcaatgaacatgcccaatccactactttaggtccaaaactcatgtttggagtggtttcgcgcaatttcgttgccgcacgtcacccattccgaaaacggttgtcgggggtgcatacaaagcacgagtttttgccaccggaaccatttcttcgtttttcgcaacgaacatgcccaatccactactttaggtccaaaactcatgtttggggaggtttcgcacaatttcgttgtcgcacgtcacccattctgaaaacgggtatcggggtgcataaaagcacgagtttttgccaccggaaccatttcttcgtttttcgcaacgaacatgcccaatccactactttaggtccaaaactcatgtttggggtggtttcgcgcaattttgttgtcgcacgtcacccattctgaaaacgtgtatcggggtgcataaaagcacgagtttttgccaccggaaccatttcttcgtttttcgtaacgaacatgccgaatccactactttaggtccaaaactcatgtttggggtggtttcgcacaatttcgttgtcgcacgtcacccattccgaaaacgggtgtcgggtgcatacaaagcacgagtttttgccaccggaaccatttcttcgtttttcgcaacgaacatgcccaatccactactttacatccaaaactcatgtttggggtggtttcgcgcaatttcgttgtcgcacgtcacccattccgaaaacgggtgtcgggtgaataaaaagcacgagtttttgccacctgaaccatttcttcgtttttcgcaacgaacatgcccaatccactactttaggtccaaaactcatgtttggggtggtttcgcgcaatttcgttgccgcacgtcacccattccgaaaacggttgtcgggggtgcatacaaagcacgagtttttgccaccggaaccatttcttcgtttttcgcaacgaacatgcccaatccactactttaggtccaaaactcatgtttggggtggtttcgcacagtttcgttgtcgcacgtcacccattctgaaaacgggtatcggggtgcataaaagcacgagtttttgccaccggaaccatttcttcgtttttcgcaacgaacatgcccaatccactactttaggtccaaaactcatgtttgggatggtttcgcgcaattttgttgtcgcacgtcacccattctgaaaacgggtatcggggtgcataaaagcacgagtttttgccaccggaaccatttcttcgtttttcgtaacgaagatgcagaatccactactttaggtccaaaactcatgtttggggtggtttagcacaatttagtcgttgcacgtcacccattccgaaaacgggtgtcgggtgcatacaaagcacgagtttttgccaccggaaccatttcttcgtttttcgcaacgaacatgccgaatccactactttaggtccaaaactcatgtttggggtgatttctcgcaatttcgttgtcgcacgtcacccattccgaaaacgggtgtcgggtgcatacaaagcacgagtttttgccaccggaaccatttcttcgtttttcgcaacgaacatgcccaacccactactttaggtccaaaactcatgtttggggtggtttcgcgcaatttcgttgccgcacgtcacccattctgaaaacggttgtcggggtggggtgcatacaaagcacgatttttgccaccggaaccatttcttcgtttttagcaacgaacatgcccaatccactactttaggtacaaaactcttgtttggggtggtttcgcgcaatttcgttgccgcacgtcacccattccgaaaacgggtgtcgggtgcatacaaagcacgagtttttgccaccggaaccatttcttcgtttttcgcaacgaacatgcccaatccactactttaggtccaaaactcatgtttggggtggtttcgcgcaatttcgttgtcgcacgtcacccattctgaaaaagggtatcggggtgcataaaagcacgagtttttgccaccggaaccatttcttcgtttttcgcaacgaacatgcccaatccactactttaggtccaaaactcatgtttggggtggtttcgcgcaattttgttgtcgcacgtcacccattctgaaaacgggtatcggggtgcataaaagcacgagtttttgccaccggaaccatttcttcgtttttcgcaacgaacatgccgaatccactactttaggtccaaaactcatgtttggggtggtttcgcacaatttcgttgtcgcacgtcacccattccgaaaacgggtgtcggggtgcatacaaagcacgagtttttgccaccggaaccatttcttcgtttttcacaacgaacatgcccaatccactactttaggtccaaaactcatgtttggggtggtttcgcacagtttcgttgtcgcacgtcacccattctgaaaacgggtatcggggtgcataaaagcacgagtttttgccaccggaaccatttcttcgtttttcgcaacgaacatgcccaatccactactttaggtccaaaactcatgtttggggtggtttcgcgcaatttcgttgccgcacgtcacccattccgaaaacggttgtcggggtgcatacaaagcacgagtttttgccaccggaaccatttcttcgtttttcacaacgaacatgcccaatccactactttaggtccaaaactcatgtttggggtggtttcgcacagtttcgttgtcgcacgtcacccattctgaaaacgggtatcggggtgcataaaagcacgagtttttgccaccggaaccatttcttcgtttttcgcaacgaacatgcccaatccactactttaggtccaaaactcatgtttggggtggtttcgcgcaattttgttgtcgcatgtcacccattccgaaaacgggtatcggggtgcataaaagcacgagtttttgccaccggaaccatttcttcgtttttcgcaacgaacatgcccaatccactactttaggtccaaaactcatgtttggggtggtttcgcgcaatttcgttgccgcacgtcacccattccgaaaacggttgtcggggtgcatacaaagcacgagtttttgccaccggaaccatttcttcgtttttcacaacgaacatgcccaatccactactttaggtccaaaactcatgtttggggtggtttcgcacagtttcgttgtcgcacgtcacccattctgaaaacgggtatcggggtgcataaaagcacgagtttttgccaccggaaccatttcttcgtttttcgcaacgaacatgcccaatccactactttaggtccaaaactcatgtttggggtggtttcgcgcaattttgttgtcgcacgtcacccattctgaaaacgggtatcggggtgcataaaagcacgagtttttgccaccggaaccatttcttcgtttttcgtaacgaacatgcccaatccactactttaggtccaaaactcatgtttggtgtggtttcgcacaatttcgttgtcgcacgtcacccattccgaaaacgggtgtcgggtgcatacaaagcacgagtttttgccaccggaaccatttcttcgtttttcgcaacgaacatgcccaatccactactttacatccaaaactcatgtttggggtggtttcgcgcaatttcgttgtcgcacgtcacccattccgaaaacgggtgtcgggtgcatacaaagcacgagtttttgccaccggaaccatttcttcgtttttcgcaacgaacatgcccaatccactactttacatccaaaactcatgtttggggtggtttcgcgcaatttcgttgtcgcacgtcacccattccgaaaacgggtgtcgggtgaataaaaagcacgagtttttgccaccggaaccatttcttcgtttttcgcaacgaacatgcccaatccactactttaggtccaaaactcatgtttggagtggtttcgcgcaatttcgttgccgcacgtcacccattccgaaaacggttgtcgggggtgcatacaaagcacgagtttttgccaccggaaccatttcttcgtttttcgcaacgaacatgcccaatccactactttaggtccaaaactcatgtttggggtggtttcgcgcaatttcgttgtcgcacgtcacccattctgaaaacgggtatcggggtgcataaaagcacgagtttttgccaccggaaccatttcttcgtttttcgcaaggacatgcccaatccactactttaggtccaaaactcatgtttggggtggtttcgcgcaattttgttgtcgcacgtcacccattctgaaaacgtgtatcggggtgcataaaagcacgagtttttgccaccggaaccatttcttcgtttttcgtaacgaacatgccgaatccactactttaggtccaaaactcatgtttggggtggtttcgcacaatttcgttgtcgcacgtcacccattccgaaaacgggtgtcgggtgcatacaaagcacgagtttttgccaccggaaccatttcttcgtttttcgcaacgaacatgcccaatccactactttacatccaaaactcatgtttggggtggtttcgcgcaatttcgttgtcgcacgtcacccattccgaaaacgggtgtcgggtgaataaaaagcacgagtttttgccaccggaaccatttcttcgtttttcgcaacgaacatgcccaatccactactttaggtccaaaactcatgtttggggtggtttcgcacaatttcgttgtcgcacgtcacccattctgaaaacgggtgtcatggtgcatacaaagcacgagtttttgccaccggaactatttctttgtttttcgcaacgaacatgccaatccactactttaggtccaaaactcatgttttgggtggtttcgcgcaatttcgttgccgcacgtcacccattctgaaaacgggtgtggggttgcatacaaagcacgagtttttgccacaggaaccatttcttcgtttttctcaacgaacatgcccaatccactactttaggtacaaaactcatgttttgggtggttttgcgcaatttcgttgccgcacgtcactcattccgaaaacgagtgtggggttgcatacaaagcacgagtttttgccaccggaaccatttcttcgtttttcgtaacgaacatgcccaatccactactttaggtccaaaactcatgtttggggtggtttcacacaatttagttgtcgcacgtcacccattccgaaaacgggtatcgggtgcatacaaagcacgagtttttgccaccggaaccatttcttcgtttttcgcaacgaacatgcctaatccagtactttaggtccaaaactcatgtttggggtggtttctcgcaatttcgttgtcgcacgtcacccattccgaaaacgggtgtcatggtgcatacaaagcacgagtttttgccaccggaaccatttctttgttttttgcaacgaacatgcccaatccactactttaggtccaaaactcatgtgttggggtggtttcgcacaatttcgttgtcgcacgtctcacccattccgaaaacgggtgtcatggtgcatacaaagcacgagtttttgccaccggaaccatttctttgtttttcgcaacgaacatgcccaatccactactttaggtccaaaactcatgtttcgggtggtttcgcgcaatttcgttgccgcacgtcacccattccgaaaacgggtgtcgggtgcatacaaagcacgagtttttgccaccggaaccatttcttcgtttttctcaacgaacatgcccaatccactactttaggtacaaaactcatgttttgggtggtttcgcgcaatttcgttgccgcacgtcactcattccgaaaacgagtgtcgggtgcataaaagcacgagtgtttgccaccggaaccatttcttcgtttttcgcaacgaacatgcccaatccactactttaggtccaaaactcatgtttgaggtggtttcgcgcaatttcgttgtcgcacgtcacccattctgaaaacgggtatcggggtgcataaaagcacgagtttttgccaccggaaccatttcttcgtttttcgtaacaaacatgcccaatccactactttaggtccaaaactcatgtttggggtggtttcgcacaatttcgttgtcgcacgtcacccattccgaaaacgggtgtcgggtgcatacaaagcacgagtttttgccaccggaaccatttctttgtttttcgtaacgaacatgcccaatccactactttaggtccaaaactcatgtttgaggtggtttcgcgcaatttcgttgtcgcacgtcacccattccgaaaacgggtgtcgggtgcatacaaagcacgagtttttgccaccggaaccatttcttcgtttttcgcaacgaacatgcccaatccactactttaggtccaaaactcatgtttggggtggtttcgcgcaatttcgttgtcgcatgtcactcattccgaaaacgggtgtcgggtgcatacagagcacgagtttttgccaccggaaccatttcttcgtttttcgcaatgaacatgcccaatccactactttaggtccaaaactcatgtttggggtggtttcgcgcaatttcgttgtcgcacgtcacccattccgaaaacgggtgtcgggtgcatacaaagcacgagtttttgccaccggaaccatttcttcgtttttgcgaacatgcccaatccactactttaggtccaaaactcatgtttggggtggtttcgcgcaatttcgttgccgcacgtcacccattccgaaaacggttgtcgggggtgcatacaaagcacgcgtttttgccaccggaaccatttcttcgtttttcgcaacgaacatgcccaatccactactttaggtacaaaactcatgtttgggtggtttcgcgcaatttcgttgtcacacgtcacccattccgaaaagggtgtcggagtgcatacaaagcacgagtttttgccagcggaaccatttcttcgtttttcgcaacgaacatgcctaatccactactttaggtccaaaactcatgtttggggtggtttctcgcaattttgttgtcgcacgttacccattccgaaaacgggtgtcatggtgcatacaaagcacgagtttttgccaccggaaccatttctttgtttttcgcaacgaacatgcccaacccactactttaggtccaaaactcatgtttggggtggtttcgcgcaatttcgttgtcgcacgtcacccattccgaaaacgggtgtcgggtgcatacagagcacgagtttttgccaccagaaccatttcttcgtttttcgcaatgaacatgcccaatccactactttaggtccaaaactcatgtttggggtggtttcgcgcaatttcgttgtcgcacgtcacccattccgaaaacgggtgtcgggtgcatacaaagcacgagtttttgccaccggaaccatttcttcgtttttcgcaacgaacatgcccaatccactactttaggtccaaaactcatgtttggggtggtttcgcgcaatttcgttgccgcacgtcacccattccgaaaacggttgtcgggggtgcatacaaagcacgcgtttttgccaccggaaccatttcttcgtttttcgcaacgaacatgcccaatccactactttaggtacaaaactcatgtttgggtggtttcgcgcaatttcgttgtcacacgtcacccattccgaaaagggtgtcggagtgcatacaaagcacgagtttttgccagcggaaccatttcttcgtttttcgcaacgaacatgcctaatccactactttaggtccaaaactcatgtttggggtggtttctcgcaattttgttgtcgcacgttacccattccgaaaacgggtgtcatggtgcatacaaagcacgagtttttgccaccggaaccatttctttgtttttcgcaacgaacatgcccaatccactactttaggtccaaaactcatgtttggggtggtttcgcacaatttcgttgtcgcacgtcacccattccgaaaacgggtgtcgggtgcatacaaagcacgagtttttgccaccggaaccatttcttcgtttttcgcaacgaacatgcccaatccactactttaggtccaaaactcatgtttggggtggtttcgcacaatttcgttgtcgcacgtcacccattctgaaaacgggtgtcatggtgcatacaaagcacgagtttttgccaccggaactatttctttgtttttcgcaacgaacatgccaatccactactttaggtccaaaactcatgttttgggtggtttcgcgcaatttcgttgccgcacgtcacccattctgaaaacgggtgtggggttgcatacaaagcacgagtttttgccacaggaaccatttcttcgtttttctcaacgaacatgcccaatccactactttaggtacaaaactcatgttttgggtggttttgcgcaatttcgttgccgcacgtcactcattccgaaaacgagtgtcaggtgcataaaagcacgagtttttgccaccggaaccatttcttcgtttttcgtaacgaacatgcccaatccactactttaggtccaaaactcatgtttggggtggtttcacacaatttcgttgtcgcacgtcacccattccgaaaacgggtgtcgggtgcatacaaagcacgagtttttgccaccggaaccatttcttcgtttttcgcaacgaacatgcctaatccagtactttaggtccaaaactcatgtttggggtggtttctcgcaatttcgttgtcgcacgtcacccattccgaaaacgggtgtcatggtgcatacaaagcacgagtttttgccaccggaaccatttctttgttttttgcaacgaacatgcccaatccactactttaggtccaaaactcatgtgttggggtggtttcgcacaatttcgttgtcgcacgtctcacccattccgaaaacgggtgtcatggtgcatacaaagcacgagtttttgccaccggaaccatttctttgtttttcgcaacgaacatgcccaatccactactttaggtccaaaaatcatgtttgggggggtttcgcacaatttcgttgccgcacgtcacccattccgaaaacggttgtcgggggtgcatacaaagcacgagtttttgccaccggaaccatttcttcgtttttcgcaacgaacatgcccaatccactactttaggtccaaaactcatgtttggggtggtttcgcacagtttcgttgtcgcacgtcacccattctgaaaacgggtatcggggtgcataaaagcacgagtttttgccaccggaaccatttcttcgtttttcgcaacgaacatgcccaatccactactttaggtccaaaactcatgtttgggatggtttcgcgcaattttgttgtcgcacgtcacccattctgaaaacgggtatcggggtgcataaaagcacgagtttttgccaccggaaccatttcttcgtttttcgtaacgaagatgcagaatccactactttaggtccaaaactcatgtttggggtggtttcgcacaatttcgttgtcgcacgtcacccattccgaaaacgggtgtcgggtgcatacaaagcacgagtttttgccaccggaaccatttcttcgtttttcgcaacgaacatgcccaatccactactttacatccaaaacccatgtttggggtggtttctcgcaatttcgttgtcgcacgttgaaagctctcttgtgagttttggtgtttggatgacaactcaattaaaggactaacaagagtactaagtgttgaacaggtgcttaaggtaaagcctacagggttcaacacaagtgaacaaatgtgatggtccaagaactggattatggatacataatggacatcacaagtaagttggacattgcaaaagtgatactcgggtgcgtagctcggagacaactgatcaagccaaggacggaggaagaaaagcttcgaggtaccaagtgcacgggagaaggtcaaggaggctgaggaacccaaagccaagggcgaagaagaaggcttgcaaagtcaagggtgatcgagttgagaacagctacggcacatcaaggatcactatataaggacgcgacttacaaccaatgaggtaacagctacagttatgtggtgtaagtcataaggctcaagaccaagctctaagaaggagatcctctagagtcgacctgcaggcatgcaagcttgagtattctatagtgtcacctaaatagcttggcgtaatcatggtcatagctgtttcctgtgtgaaattgttatccgctcacaattccacacaacatacgagccggaagcataaagtgtaaagcctggggtgcctaatgagtgagctaactcacattaattgcgttgcgctcactgcccgctttccagtcgggaaacctgtcgtgccagctgcattaatgaatcggccaacgcgaaccccttgcggccgcccgggccgtcgaccaattctcatgtttgacagcttatcatcgaatttctgccattcatccgcttattatcacttattcaggcgtagcaaccaggcgtttaagggcaccaataactgccttaaaaaaattacgccccgccctgccactcatcgcagtactgttgtaattcattaagcattctgccgacatggaagccatcacaaacggcatgatgaacctgaatcgccagcggcatcagcaccttgtcgccttgcgtataatatttgcccatggtgaaaacgggggcgaagaagttgtccatattggccacgtttaaatcaaaactggtgaaactcacccagggattggctgagacgaaaaacatattctcaataaaccctttagggaaataggccaggttttcaccgtaacacgccacatcttgcgaatatatgtgtagaaactgccggaaatcgtcgtggtattcactccagagcgatgaaaacgtttcagtttgctcatggaaaacggtgtaacaagggtgaacactatcccatatcaccagctcaccgtctttcattgccatacgaaattccggatgagcattcatcaggcgggcaagaatgtgaataaaggccggataaaacttgtgcttatttttctttacggtctttaaaaaggccgtaatatccagctgaacggtctggttataggtacattgagcaactgactgaaatgcctcaaaatgttctttacgatgccattgggatatatcaacggtggtatatccagtgatttttttctc

SEQ ID NO: 69 - DNA, 20048 bp, Zea mays
cgaatcctagatatcatcgccactgtgctggaagttcgttgtgaaaacgaagaaatggttccggtggcaaaaactcgtgctttgtatgcaccccgacaaccgttttcggaatgggtgacgtgcggcaacgaaattgcgcgaaaccaccccaaacatgagttttggacctaaagtagtggattgggcatgttcgttgcgaaaaacgaagaaatggttccggtggcaaaaactcgtgctttttattcacccgacacccgttttcggaatgggtgacgtgcgacaacgaaattgcgcgaaaccaccccaaacatgagttttggatgtaaagtagtggattgggcatgttcattgcgaaaaacgaagaaatggttccggtggcaaaaactcgtgctttgtatgcacccgacacccgttttcggaatgggtgacgtgcgacaacgaaattgtgcgaaaccaccccaaacatgagttttggacctaaagtagtggattcggcatgttcgttacgaaaaacgaagaaatggttctggtggcaaaaactcgtgcttttatgcaccccgatacccgttttcagaatgggtgacgtgcgacaacaaaattgcgcgaaaccaccccaaacatgagttttggacctaaagtagtggattgggcatgttcgttgcgaaaaacgaagaaatggttccggtggcaaaaactcgtgcttttatgcaccccgataccctttttcagaatgggtgacgtgcgacaacgaaactgtgcgaaaccaccccaaacatgagttttggacctatagtagtggattgggcatgttcgttgtgaaaaacgaagaaatggttccggtggcaaaaactcgtgctttgtatgcaccccgacaaccgttttcggaatgggtgacgtgcggcaacgaaattgcgcgaaaccaccccaaacatgagttttggacctaaagtagtggattgggcatgttcgttgcgaaaaacgaagaaatggttccggtggcaaaaactcgtgctttttattcacccgacacccgttttcggaatgggtgacgtgcgacaacgaaattgcgcgaaaccaccccaaacatgagttttggatgtaaagtagtggattgggcatgttcattgcgaaaaacgaagaaatggttccggtggcaaaaactcgtgctttgtatgcacccgacacccgttttcggaatgggtgacgtgcgacaacgaaattgtgcgaaaccaccccaaacatgagttttggacctaaagtagtggattgggcatgttcgttgagaaaaacgaagaaatggttccagtggcaaaaactcgtgctttgtatgcacccgacacccgttttcggaatgggtgacgtgcggcaacgaaattgcgcgaaaccacccgaaacatgagttttggacctaaagtagtggattgggcatgttcgttgcgaaaaacaaagaaatggttccggtggcaaaaactcgtgctttgtatgcaccatgacacccgttttcggaatgggtgacgtgcgacaacgaaattgttcgaaaccaccccaaacatgagttttggacctaaagtagtggattgggcatgttcgttgcgaaaaacgaagaaatggttccggtggcaaaaactcgtgctttgtatgcaccatgacacctgttttcggaataggtgacgtgcgacaacgaaattgtgcgaaaccaccccaaacatgagttttggacctaaagtagtggattgggcatgttcgttgcgaaaaataaagaaatggttccggtggcaaaaactcgtgctttgtatgcaccatgacacccgttttcggaatgggtgacgtgcgacaacgaaattgcgagaaaccaccccaaacatgagttttggacctaaagtagtggattaggcatgttcgttgcgaaaaacgaagaaatggttccggtggcaaaaactcgtgctttgtatgcactccgacacccgttttcggaatgggtgacgcgtgacaacgaaattgcgcgaaaccaccccaaacatgagttttggacctaaagtagtggattgggcatgttcgttacaaaaaacgaagaaatggttccggtggcaaaaactcgtgctttgtatgcacccgacacccgttttcggaatgggtgacgtgcgacaacgaaatatcgagaaatcaccccaaacatgagttttggacctaaagtagtggattgggcatgttcgttgcgaaaaacgaagaaatggttccggtggcaaaaactcgtgctttgtatgcacccgacacccgttttcggaatgggtgacgtgcgacaacgaaattgcgcgaaaccaccccaaacatgagttttggacctaaagtagtggattgggcatgttcattgtgaaaaacgaagaaatggttccggtggcaaaaactcgagctctatatgcacccgacacccgttttcggaatgggtgacgtgcgacaacgaaattgcgtgaaaccaccccaaacatgagttttggacctaaagtagtggattgggcatgttcgttgcgaaaaacgaagaaatggttccggtggcaaaaactcgtgctttgtatgcacccgacacccgttttcggaatgggtgacgtgcgacaacgaaattgcgagaaaccacctcaaacatgagttttggacctaaagtagtggattgggcatgttcgttacgaaaaacgaagaaatggttccggtggcaaaaactcgtgctttgtatgcacccgacacccgttttcggaatgggtgacgtgcgacaacgaaattgtgcgaaaccaccccaaacatgagttttggacctaaagtagtggattgggcatgtttgttacgaaaaacgaagaaatggttccggtggcaaaaactcgtgcttttatgcaccccgatacccgttttcagaatgggtgacgtgcgacaacgaaattgcgcgaaaccacctcaaacatgagttttggacctaaagtagtggattgggcatgttcgttgcgaaaaacgaagaaatggttccggtggcaaacactcgtgcttttatgcacccgacactcgttttcggaatgagtgacgtgcggcaacgaaattgcgcgaaaccacccaaaacatgagttttgtacctaaagtagtggattgggcatgttcgttgagaaaaacgaagaaatggttccggtggcaaaaactcgtgctttgtatgcacccccacaccggtttttagaatgggtgacgtgcggcaacgaaattgcgcgaaaccacccgaaacatgagttttggacctaaagtagtggattgggcatgttcgttgcgaaaaacaaagaaatggttccggtggcaaaaactcgtgctttgtatgcaccatgacacccgttttcggaatgggtgacgtgcgacaacgaaattgcgagaaaccaccccaaacatgagttttggaccaaaagtagtggattaggcatgttcgttgcgaaaaacgaagaaatggttccggtggcaaaaactcgtgctttgtatgcactccgacacccgttttcggaatgggtgacgtgtgacaacgaaattgcgcgaaaccaccccaaacatgagttttggacctaaagtagtggcttgggcatgttcgttacaaaaaacgaagagatggttccggtggcaaaaactcgtgctttgtatgcacccgacacccgttttcggaatgggtgacgtgcgacaacgaaattgcgagaaagcaccccaaacatgagttttggacctaaagtagtggattgggcattttcgttgcgaaaaacgaagaaatggttccggtggcaaaaactcgtgctttgtatgcaccccgacacccgttttcggaatgggtgacgtgcgacaacgaaattgcgcgaaaccaccccaaacatgagttttggacctaaagtagtggattgggcatgttcgttgcgaaaaacgaagaaatggttccggtggcaaaaactcgtgctttgtatgcaccccgacaaccgttttcagaatgggtgacgtgcggcaacgaaattgcgcgaaaccaccctaaacatgagttttggacctaaagtagtggattgggcatgttcgttgcgaaaaacgaagaaatggttccggtggcaaaaactcgtgctttgtatgcacccgacacccgttttcggaatgggtgacgtccgacaacgaaattgtgcgaaaccaccccaaacatgagttttggacctaaagtagtggattgggcatgttcgttgcgaaaaacgaagaaatggttccggtggcaaaaattgtgctttgtatgcaccccgacaaccgttttcagaatgggtgacgtgcggcaacgaaattgcgcgaaaccaccccaaacatgagttttggacctaaagtagtgggttgggcatgttcgttgcgaaaaacaaagaaatggttccggtggcaaaaactcgtgctttgtatgcaccatgacacccgttttcagaatgggtgacgtgcgacaacgaaattgtgcgaaaccaccccaaacatgagttttggacctaaagtagtggattgggcatgttcgttgcgaaaaacgaagaaatggttccggtggcaaaaattcgtgctttgtatgcaccatgacacccgttttcggaatgggtgacgtgcgacaacgaaattgtgcgaaaccaccccaaacatgagttttggacctaaagtagtggattgggcatgttcgttgcgaaaaacaaagaaatggttccggtggcaaaaactcgtgctttgtatgcaccatgacacccgttttcggaatgggtgacgtgcgacaacgaaattgcgagaaaccaccccaaacatgagttttggacctaaagtagtggattaggcatgttcgttgcgaaaaacgaagaaatggttccgctggcaaaaactcgtgctttgtatgcactccgacacccttttcggaatggctgacgtgtgacaacgaaattgcggaaaccacccaaacatgagttttgtacctaaagtagtggattgggcatgttcgttgcgaaaaacgaagaaatggttccggtggcaaaaacgcgtgctttgtatgcaccccgacaaccgttttcggaatgggtgacgtgcggcaacgaaattgcgtgaaaccaccccaaacatgagttttggacctaaagtagtggattgggcatgttcgttgcgaaaaacgaagaaatggttccggtggaaaaaaactcgtgctttgtatgcacccgacacccgttttcggaatgggtgacgtgcgacaacgaaattgcgcgaaaccaccccaaacatgagttttggacctaaagtagtggattgggcatgttcattgcgaaaaacgaagaaatggttccggtggcaaaaactcgtgctctgtatgcacccgacacccgttttcggaatgggtgacgtgcgacaacgaaattgcgcgaaaccaccccaaacatgagttttggacctaaagtagtggattgggcatgttcgttgcgaaaaacgaagaaatggttccggtggcaaaaactcgtgctttgtatgcacccgacacccgttttcggaatgggtgacgtgcgacaacgaaattgtgcgaaaccaccccaaacatgagttttggacctaaagtagtggattgggcatgttcgttgcgaaaaacgaagaaatggttccggtggcaaaaatcgtgctttgtatgcaccccgacaaccgttttcagaatgggtgacgtgcggcaacgaaattgcgcgaaaccaccccaaacatgagttttggacctaaagtagtgggttgggcatgttcgttgcgaaaaacgaagaaatggttccggtggcaaaaactcgtgctttgtgtgcacccgacacccgttttcggaatgggtgacgtgcgacaacgaaattgcgagaaatcaccccaaacatgagttttggacctaaagtagtggattgggcatgttcgttgcgaaaaacgaagaaatggttccggtggcaaaaactcgtgctttgtatgcaccccgacacccgttttcggaatgggtgacgtgttacaacgaaattgcgcaaaaccaccccaaacatgagttttgtacctaaagtagtggattgggcatgttcgttgcgaaaaacgaagaaatggttccggtggcaaaaactcgtgctttgtatgcaccccaacacccgttttcggcatgggtgacgtgcggaaacgaaattgcgcgaaaccaccccaaacctgagttttggacctaaagtagtggattgggcatgttcgttgcgaaaaacgaagaaatggttccggtggcaaaaactcgtgctttgtatgcacccgacacccgttttcggaatgggtgacgtgcgacaacgaaattacgcgaaaccactccaaacatgagttttggatgtaaagtagtggattgggcatgttcgttgcgaaaaacgaagaaatggttccagtggcaaaaatcgtgctttgtatgcaccccgacaaccgttttcagaatgggtgatgtgcggcaacgaaattgcgcgaaaccaccccaaacatgagttttgtacctaaagtagtggattgggcatgttcgttgagaaaaacgaagaaatggttccggtggcaaaaactcgtgctttgtatgcaccccgacacccgttttcggaatgggtgacgtgctgcaacgaaattgcacgaaaccaccccaaacatgagttttggacctaaagtagtggattgggcatgttcgttgcgaaaaacgaagaaatggttccggtggcaaaaactcgtgctttgtatgcacccgacacccgttttcggattgggtgatgtgcgacaacgaaattacgcgaaaccaccccaaacatgagttttggatgtaaagtagtggattgggcatgttcgttgcgaaaaacgaagaaatggttctggtggcaaaaactcgtgctttgtatgcaaccgacacccgttttcggaatgggtgacgtgcgacaacgaaattgcgcgaaaccaccccaaacatgagttttggatctaaagtagtggattgggcatgttcgttgcgaaaaacgaagaaatggttccggtggcaaaaactcgtgctttgtatgcacccgacacccgttttcggaatgagtgacgtgcgaaaacgaaattgtgcgaaaccaccccaaacatgagttttggacctaaaaaagtggattgggcattttcgttacgaaaaacgaagaaatggttccggtggcaaaaactcgtgcttttatgcaccccgatacccgttttcagaatggtttatgcacccgacactcgttttcggaatgggtgacgtgcggcaacgaaattgcgcgaaaccaccccaaacaagagttttgtacctaaagtagtggattgggcatgttcgttgctaaaaacgaagaaatggttccggtggcaaaaatcgtgctttgtatgcaccccaccccgacaaccgttttcagaatgggtgacgtgcggcaacgaaattgcgcgaaaccaccccaaacatgagttttggacctaaagtagtgggttgggcatgttcgttgcgaaaaacgaagaaatggttccggtggcaaaaactcgtgctttgtatgcacccgacacccgttttcggaatgggtgacgtgcgacaacgaaattgcgagaaatcaccccaaacatgagttttggacctaaagtagtggattcggcatgttcgttgcgaaaaacgaagaaatggttccggtggcaaaaactcgtgctttgtatgcacccgacacccgttttcggaatgggtgacgtgtgacaacgaaattgcgcaaaaccaccccaaacatgagttttgtacctaaagtagtggattgggcatgttcgttgcgaaaaacgaagaaatggttccggtggcaaaaactcgtgctttgtatgcacccgacacccgttttcggattgggtgatgtgcgacaacgaaattacgcgaaaccacccctgatgaggacatcaacaccaacacgagcacatctacaccagcagcaccttctccagcccaggcaccatcttccccagtccaggcgccaccccttccacctgggccagtgactcgggcccgtgcaagagaattgaactacattatgctgttaaagaacgaaggcccggaagaatagacgaccagcccaactgcggcccataatggacgacctagggttggccgcccctaggggctgcgcccctctctatttatccaggagctgcgcctcctttatttctggagttttgttttacgttagccttagctactctcgaacacgcgcaaatctgcgctgtcttcgtgtattcagaactccaccctcgagtaatagattagattgctcgcctctttttcttgttcgttcttcgattgcgcacaggaaacgatcttcgtgatcaggccgatctcgcatcagcaaggtcggtaaccacagggagttggttcagcgattgcattggcgcctcgggcttgctcgtcgtagtcggatcgcaagggtcatcttccgccaaatcggaattatctctactcgccgaaagatcgggcacctcagctacatcaattggtatcagatttccaggttgatcggtgagtttatcgagcgtttttttcctacagtccacaaaaccacataaaaattcaggttagatcttatcccagcacccttttgagcctcgcactttctttcaataatctgcattgttgaatttgtgtgctttcgcgtttccttgttgctggttgcattgtgttcttccaccattcaaatcctagcgccgccatcatcttccgtttgatcacgccacaaaccgagtcaacatcgtctccttgtttttctccttcggttacgaaaaaaaaacagaaaaaaaaaacaaaccgagtcaacgaccgcttccttgtttttctccttcggttacataaaaaaaacagaaacaaaaaaaaagaaaacgaaggagaagggatacggttgtttcatcccggtcgtttttaaaacataacttgaggtaccttccgtaaaccgggcataacttttcgctcgggtgtccaaaaaatctgaaatttttacaggagcttgttgacaccattcggaggccggccaaactgacctttggtctgtttggattcgacaaaattgtcaaaaaaattcaggaaaataaagaaaaaaatccgtcaaagttctcgcacgcttttcagagaacttcctgattttctgtagaccacatctgatctctgttttcggtgaaacttcgtctagctcctattttgttgcttcttgtgctgagaaaaatatcaaaaaatcatacaaaaaaagaaaaacaaaatcacttgtgattcctactagtggcctcgctagtacaatatttacggtactgccattctgctagttccatccgtcctttgcacttgtggccagcaatatagtttcgtgttctgcactataattcaactttgcattattgtttgatcgtgctaatccttgacttgagtgcagcctacccaaaactccacatatttctacgacgagacggtttctgtttctccaggcaatcgctaatccaatctttcaccggttccacctgttgattgcagttcaccactgtggcttggtaagaacggataagaacttgataacaacactagtgtgagcgccttgtgagcagtacacccctgtttttgtcgttggtttttctccttttggtgttttggtgtttgcgctaactatggcaggagcacacgacatggtggatgcccagttgcaggaagtaaggggacaagttgatggacttgctgctgacattcggacgatgcatgaacggcttgattcaacgatcacttcgacgaccgagcgtttcaaccaacttgaccttgctcaaacggcgactcgcaccacactcgacaccatcctggcacgccttgatgcattgaccacaaagatggagcaggaatacggcggtgacactgagcaggacgatggagatcgccgtggtcgtgcacgtcgtgtggttcgtcatccccctaatgacttattttctaagattaaatttaaaattccatcttttaatggtaaatatgatcctgctgcatatcttgattgggaattagaggtagaacagaaattttcatgccatgatattcctgctcatagccaagtgaaggctgccattagtgaatttactgattttgctttaatttggtggcgcgagtataatcaaaaacttcccattaacaatgtcattacttggacccaattaaaaactgccatgcgccacagatttgttccttcctattatgctcgtgatttgcttaacaaaatgcagcgttttcaacaaggttcacagtctgttgaggaatattaccaggagttacaaaagggtatgcttcgttgtggtttagttgagtcggatgacgctgctatggcgcgttttcgtggtggtttgaacagggaaattcaggatatacttgattataaggattattttgatataaccacattatttgaatatgcttgcaaagctgaacgtgaagtgcagggacgccgctcgaagccatattctaacccttttgcaggacgaagctcgacatccacctcagcaccagttccccctgcgccatcgacgtccaccactacttcacgcgagaagacgaccaaaccagccagcactgccccacccacaggtcgtacacgggatattcagtgtcatcgctgtagaggatttggccatgtgattcgggactgcccaaacaagcgcactttgctcattcgtgacgatggtgagtactcttccgctagtgattctgaagaaattgaacatgcactacttgccacttaccatgcagctaaggcggaggtacatgtcaacccgagcgacgctgataggtatgaaagtcttgttgtgcagcgtgttctcagtacacaggtcgctttgcccgagaagaatcagcgacacactctgttccatacaaagggtgttgtgcaggagcggtcaattcgcatcattatcgacagtggcagttgcaacaatttggcgagtaccatgctggtcgacaagttatcgttacccactcgtaagcatccaaacccatatcacattcaatggcttaatgatggtggtaaaataaaaatcacacgttccgtgcgtgttcctttctccatgggtgcttattctgattttgttgattgtgatgttattcccatggaagcatgctctttgttacttggtcgaccttggcaatatgatactgatagcttgcatcatggtcgttcgaatcattattctttcatttttaagggtcagaaaataattatacatccaatgacacccgaacaaattgttaaagatgatcttgcccgagctgctataactgctaaacaacttgatccatcgccctctgttccttctgaaatcaagttgaaggctcctgttttacttgctacacgtgctgattttgatgatctacacggtgctcatttgccatgctatgcacttatatgctctagtgtcctcatttcacttgatgatgcaccatctttggctattccccctatggttgctaaccttttgcaagagtacgctgatgtctttcccaaagacttaccaccgggtctcccaccacttcgtggcattgagcaccagatcgacctcattcccggcgcacagcttccgaaccgcgcaccgtaccgtacaaatccggatgagacgaaggagattcagcgccaggtacaggcgttgcttgacaagggatacattcgtgagtctcttagcccttgctctgttcctgtgttacttgttcccaagaaagatgggtcatggcgtatgtgtgtagactgtcgtgctattaataacatcactattcgttatcgatatcctataccacgccttgatgatatgctagatgagcttagtggtgccattattttcactaagattgatttgcgtagtggttaccaccagattagaatgaaactgggtgatgaatggaaaacggcttttaaaacgaaatttggtttatatgaatggttggttatgccgtttggattgactaatgctcccagcacttttatgcgagtgatgaatgaagttctaaggcccttcataggattgtttgtggttgtttattttgatgatattcttatttacagcaaatctacgaaagagcatttggaacatttacgtgctgtttttgatgcattgcgtgctgctcagttatttgctaacatggaaaaatgcatgttttgtacacgacgtgtctcgtttcttggttatgttgttactccacagggcattgaggtggatagcagcaagattgctgccattcgggagtggcctacaccgacgacggtcacacaaatttggagctttcttggacttgccggtttctaccgcagatttgttcgtgattttagctccattgcagcgcctctacatgagcttacaaagaaagatgtgccatttgcttggagtgattcccaggaggaagcgttcagcactttgaaagataagttaacccaagctcccctattgcaattgcctgattttaataaagtgtttgagcttgaatgcgatgctagcggtattgggctaggtgctgttttgttacaagaaggaaaaccagttgcttattttagtgaaaaattaagcggtgctagtctgaaatattctacttatgataaggagctttacgctttagtgcgcactttgcatacatggcagcactatctttggcatcgtgagtttataatccattctgatcatgaggctttaaaacatattcgtacccaaacaaatctgaaccgtcgtcatgctaaatgggtagaattcattgagtcctttccttacattattaaacacaagaacgggaaggacaatgttattgctgatgctttgtctcgtcgctataccatgctgtcacagttagattttaaaatctttggtttgcacactctgaaagatcaatatgttgatgatgctgattttaaagatgctttcggccattgtattaatgggaaaccatggggcaaatttcacatacaggatgggttcctgtttcgcgctaacaagctgtgtgttccagctagctcggttcgtcttttgttgttacaggaagcacatggaggcggtctcatggggcactttggcgtctacaagacacatgaggtgttggctgcccacttcttttggcctcggatgcgcgctgatgttgagcgccttgttgcacgctgcactacttgtcagaaagctaagtcacggttgaacaaccattgtttgtatatgcctttgcctgttcctactttcccttggattgatatttcgatggattttgttttgggattgcctagaactaagaaggggagggatagcatttttgtggttgttgatcgattctccaaaatggctcatttcataccttgtcataagactgatgatgctagcaatgttgctgaattgttttttagagagattattcgtttgcacggtattcccaatacaatagtctcggatcgtgatgctaagtttctgagtcatttttggagatctctgtggaataaattgggaactaaattgctgtttagcaccacttgtcaccctcagactgatggtcaaactgaggtagttaatcgaactttgtctaccatgcttagggctgttttagacaaaaatttgaaacgttgggaggattgcttgcctcatgttgagtttgcttataatcatgcaacccattcttctacaaagatgtgcccttttcaaattgtttatggttacattcctagggcgcctattgctttgttttcgcttgatgctgcggacgccccacacatagcttcctcctcccaagttaagcgaggtgggataattctgaggctcacacggtcaccgtccgactacaattgggccaactggccaattgcgtctttgccaacgggtaatagtggaggatgtcctcatcaaacatcatcacgcacaatagcctcaggggacatgggaagcaaaataattttcttatcatggtgtatgagagaatattgatttgatctaccatgatgcatacaatctgaatcatattgccatggtctacctagcagaatattacaagcatccataggcacaacatcacagtcaacaacatcacgatatgaaccaatagcaaaattaattcgtaccagcttggttaccttgaccttaccactattgttgagccattgaatgtgatatggatgcgggtgtggtttggtcgtaagtgcaagcttctccaccatgtcgctgctagccaagttgttgcagctacctccatcaatgatcaaacgacatgaacgctccttaatgacacactttgtttgaaacaacgtatgtcgctgattctgctctgccttctccatttgtgcactaagcacacgctgtacaatgaggctctcataatgctctgcatcatctgcaccaatctgttcttcgggtggttccttagtgcctgcatcatcagccgcaagcaaagcaagtgtagcttcatccaaatcactagcagaggaatacccaccatcgtcttttaccaccaaaacacgctgattaggacaatcacgctgcacgtgtccatagcccttgcatcgataacacagaacatctcttgttctacctgtggaagctactgaagaggccctacctgcgggttcctgggcagatttggttgctgaatttatggaagatgcacgtggtttgtcgctggaggaaggcgggggtgctggtcgacttggcgaaggagttggtgctggtgtacggccggtcatggacgtagtcgtgcgctgttgccatggtgtagattttcctgcagaaacattagaccttgcactagcacgtcgtccctgcacttccctttcagctttgcaagcaagatgaaacaatcgggttacattagcataatctttataagcaaggatgtcctgaatttccctatttaacccgcccaaaaatctagccatagcagattcctcaccctcctctatgttacaacgcagcatacccatttgtaattcctgataatattcttctacacttttagtaccctgtctcaattgttgcaacttgtttaacatatcacgtgcataataagaaggaacaaatctagcccgcatgacccgtttcaacgcatcccaagtttgtggcatgttattaggattcttcttaccatgttctatccaccaaacaaaagcaaattcagtaaactcactagtagcagctctaacccgcgcattctcaggaaattcatggcatgcaaacttttgatcaaccgcaatctcccaagtaatgtaagcatcagggtcatatttaccatcaaaaggaggtattttaaatttaaccttactaaaagcatcatcattaccatgtacctcacgtcggcgaaaaccatccatacctctacggttagtacgtagtcgccggcgattaggtgcttcttggtcatcttgttcagtatcagcaacatagtcatcccagttaccttcggcgccctcatcacgcccaccattgatattagcatgcatctcatcaaaccgcctcaagagtgcgacaaggctcttgtcaatatgagcaactgtcatttccacttttgcaagtttggtgtttgtgtcgatctgtgtggcctccaattgccccatctttttattcgtcacctgcatgtcattatcaagaccttccgtgtgcgtcttcaccagccttacaaagtgttgtatgatacccttggtgcgaggagagtgtggcatattatgagaagcatcatcaacctccaatcctgccatggttagacgaatagaggcaacaagaaaaaaaacgtgaaggaatgaaaactctacaactattaggatgtagctactgcaaggcgctcactctcaacctgccacacaagctcttaccaattcttaccttgcacaacaggaggggtcagcaaccaacaagtctgcaactgtggaataagtgtatcggtgccgcagcaacacgacctgtcaaactgtagtcgaaatatgtagagttgtaggtgggctgaagcaaggaatacactagtaccacgttagttacaaaagcaagctgaataatcgttcaacggtggtactgtgctggtcctaggctaaaccaggctagagacgtgagcctaggcacaaaggtagtcactgaaaaagaacaactagcacagcacaaagagaaacaacagatttagagattcagcccccttcttcttcttttccttttttttcttttctattctttttttttcttcttcttctgtttttttttgcaggggcctaaaccctttttttcactatgacaacccaaacaataaagatattgctaacagcccctttaaatcagatttaacaaatcttgttaatatagaaagtccagaaatctctacgatgattgcggagcgctcagaacgaattttgagataaggtcagatccattggaaagaagataagataagctttccagattgtatttaaacttccaaatcggatatgatatgtatccgtggtggcaaaaacgaaccagagatgtttttggtgatggtggatctcgtggtgaccaaaacgtggtagaactcaaaactctaaaggaataaactaagaccagcaactcgacacaaccgatgcaaccaaaaactcaacaagccctaactaagtagtactagtaaatgctcaatggtttataggattgcggtaaaactaatctactattttttggctttttctggactataggagataagaaaacagcgaagaaaagtaaatctctcaccgataaaccttgttctgataccaactgatgtgcacccgttgggtgattgcccgatctttcgatgagagggtgtggaataactcgattgggggaggagacgacgttcacggcccgactacagccttccaaagacgctgcgccttagcaaccgatacaccacctcctatggctgtcacgatcttgtggagcgtgacaccctggccactagggcactcgtcctgcaagcaatcgaagaactagcaagaacaagtagaacaagtactgaattaccagatctaaatgtaggtttcaaaatcaaactccaatatggtggggttccgaagacaagaagacgggcggctgaactagcacgcgcgcttgcaagcaagtagcgagagctaaacttgatctaaacaaaacccgctgttcttggtgacggctagggggtttataaacatgggaggacgaccacaagggtattggggtcgtgctgcaaccctaggatgcgtccctaatggacctaacttgatacacgacccattgggccaaaatagggtgacgcagcaccatgggcagaaaaggcaggaaatgtctcggtaagaaaacaatgattacggcggcctcagaacagatatgactataattccggatccatatgaaagtagacttgataagctttccatgttgtgcttgaacattccaatccgagcccgcatctgaccgtggtgaccgtcacaagttggtgttcttctgcagtccgaatccagcatgttcaaatccttttccctttcggtcttctccctgattcctaagcaaaacaagagtgcacgggtctccatggtctaaatatgatggacatgaactcaagagtgtaatcacctgatggttgagttgacgagcacgagcgcgagtaatgggaccagaaattggtacttgtattggtatagatgcatcagtagtgtggatgtcttcatcatcacccattccgaaaacgggtgtcgggtgaataaaaagcacgagtttttgccaccggaaccatttcttcgtttttcgcaacgaacatgcccaatccactactttaggtccaaaactcatgtttggggtggtttcgcgcaatttcgttgccgcacgtcacccattccgaaaacggttgtcggggtgcatacaaagcacgagttttttccaccagaaccatttcttcgtttttcacaacgaacatgcccaatccactactataggtccaaaactcatgtttggggtggtttcgcacagtttcgttgtcgcacgtcacccattctgaaaacgggtatcggggtgcataaaagcacgagtttttgccaccggaaccatttcttcgtttttcgtaacgaacatgcccaatccactactttaggtccaaaactcatgtttggtgtggtttcgcacaatttcgttgtcgcacgtcacccattccgaaaacgggtgtcgggtgcatacaaagcacgagtttttgccaccggaaccatttctttgtttttcgtaacgaacatgcccaatccactactttaggtccaaaactcatgtttgaggtggtttcgcgcaatttcgttgtcgcacgtcacccattccgaaaacgggtgtcgggtgcatacaaagcacgagtttttgccaccggaaccatttcttcgtttttcgcaacgaacatgcccaatccactactttaggtccaaaactcatgtttggggtggtttcgcgcaatttcgttgtcgcatgtcactcattccgaaaacgggtgtcgggtgcatacagagcacgagtttttgccaccagaaccatttcttcgtttttcgcaatgaacatgcccaatccactactttaggtccaaaactcatgtttggggtggtttcgcgcaatttcgttgtcgcacgtcacccattccgaaaacgggtgtcgggtgcatacaaagcacgagtttttgccaccggaaccatttcttcgtttttcgcaacgaacatgcccaatccactactttaggtccaaaactcatgtttggggtggtttcgcgcaatttcgttgccgcacgtcacccattccgaaaacggttgtcgggggtgcatacaaagcacgcgtttttgccaccggaaccatttcttcgtttttcgcaacgaacatgcccaatccactactttaggtacaaaactcatgtttgggtggtttcgcgcaatttcgttgtcacacgtcacccattccgaaaagggtgtcggagtgcatacaaagcacgagtttttgccagcggaaccatttcttcgtttttcgcaacgaacatgcctaatccactactttaggtccaaaactcatgtttggggtggtttctcgcaatttcgttgccgcacgtcacccattccgaaaacgggtgtcgggtgcatacaaagcacgagtttttgccaccggaaccatttcttcgttttttgtaacgaacatgcccaatccactactttaggtccaaaactcatgtttggggtggtttcgcgcaatttcgttgtcacgcgtcacccattccgaaaacgggtgtcggagtgcatacaaagcacgagtttttgccaccggaaccatttcttcgtttttcgcaacgaacatgcctaatccagtactttaggtccaaaactcatgtttggggtggtttctcgcaatttcgttgtcgcacgtcacccattccgaaaacgggtgtcatggtgcatacaaagcacgagtttttgccaccggaaccatttctttgttttttgcaacgaacatgcccaatccactactttaggtccaaaactcatgtgttggggtggtttcgcgcaattttcgttgccgcacgtcacccattctgaaaacgggtgtggggttgcatacaaagcacgagtttttgccacaggaaccatttcttcgtttttctcaacgaacatgcccaatccactactttaggtacaaaactcatgttttgggtggttttgcgcaatttcgttgtcgcacgtcacccattccgaaaacgggtgtcgggtgcatacaaagcacgagtttttgccaccggaaccatttcttcgtttttcgcaacgaacatgcctaatccagtactttaggtccaaaactcatgtttggggtggtttctcgcaatttcgttgtcgcacgtcacccattccgaaaacgggtgtcatggtgcatacaaagcacgagtttttgccaccggaaccatttctttgtttttgcaacgaacatgcccaatccactactttctttccagcacatggagcttcagcgaattcaagcttgaatcttcagga

SEQ ID NO: 70 - DNA, 172 bp, Zea mays
tggttccggtggcaaaaactcgtgchttdwmttgcacycccgacacccggttttcgggaatgggtgacgtgcggcaacgaaattgcgcgaaaccaccccaacacaatgagttttggacctaaagtagtggattgggcatgttcgttgcgaaaaacgaagaaatgrttcyggt

SEQ ID NO: 71 - DNA, 188 bp, Zea mays
  misc_feature (46)..(46): n is a, c, g, or t
ccatttcttcgtttttkcgcmaaacgaacvmmatgcccbhaatccnactwactttwaaggdtccaaaaactcatkgtttggggdtggdtttcgcgcaartttcgrtttgtcgcacgtctcacccatttccgaaaamcgggtgtcgggkktgcatacaaagcacgagtttttgtccaccggaaccatct

SEQ ID NO: 72 - DNA, 158 bp, Zea mays
tttcatcccggtcgtttttagaacataacttgaggtaccttccgtaaaccgggcataacttttcgctcgggtgtccaaaaaatctgaaatttttataggagctagttgacaccattctgaggccggccaaactcacctacggtctgtttggggttcga

SEQ ID NO: 73 - DNA, 176 bp, Zea mays
acaaaccgagtcaacggycgtttccttgtttttctccttcggttaaccgaaaaaaaaacagvaaaaaaaaaamcaaaccgagtcmaacgaccggcccttccttgtttttctccttcggttacdtaaaaaaaacagaaacaaaaaaaaagaaaacgaaggagaagggatacggttgt

SEQ ID NO: 74 - DNA, 193 bp, Zea mays
gacgtaaccgaaggagaaaaayaaggaracgatgttgactcggtttgtggygtgatcaaayggragatgrtggcggcgctaggrtttgaatggtggaagaacacaatgcaaccagcaacaarkraacgcgaaagcacacaaattcaacaatgcagattattgaaagaaagtgygaggctcaaaagggtgctgg

SEQ ID NO: 75 - DNA, 147 bp, Zea mays
gcagggacgacgatcaaagacatatactaactctcttgcaggccggggtccaacacacagctcaactccttccagccctgcaccttctacgcctagcactacatcgcgcacagggacgaccaagccagtggcgccccctgccaaagg

SEQ ID NO: 76 - DNA, 466 bp, Zea mays
ggttcaggtagtaaaaactcgtgctttgtatgcaccccgatacccgttttcggaatgggtgacgtgaggcaacgaaattgcgcgaaaccaacccaaacatgagttttggacctaaagtagtggattgggcatgttcgttgcaaaaaacaaagaaatggttccggtggcaaaaactcgtgctttgtatgcacccgacacccgttttcggaatgggtgacgtgcggcaacgaaattgcgagaaaccacctcaaacctgagttttggacctaaagtagtggattgggcatgtttgttgcgaaaaacgaagaaatggttccggtggcaaaaactcgtgctttgtatgcacccgacacccgttttcggaatgggtgacgtgcgacaacaaaattgcgcgaaacctccccaaacatgagttttggacctaaagtagtggattaggcatgttcattgcgaaaaacgaagaaat

SEQ ID NO: 77 - DNA, 7572 bp, Zea mays
tgatgaagacatccacactactgatgcatctataccaatacaagtaccaatttctggtcccattactcgcgctcgtgctcgtcaactcaaccatcaggtgattacactcttgagttcatgtccatcatatttagaccatggagacccgtgcactcttgttttgcttaggaatcagggagaagaccgaaagggaaaaggatttgaacatgctggattcggactgcagaagaacaccaacttgtgacggtcaccacggtcagatgcgggctcggattggaatgttcaagcacaacatggaaagcttatcaagtctactttcatatggatccggaattatagtcatatctgttctgaggccgccgtaatcattgttttcttaccgagacatttcctgccttttctgcccatggtgctgcgtcaccctattttggcccaatgggtcgtgtatcaagttaggtccattagggacgcatcctagggttgcagcacgaccccaatacccttgtggtcgtcctcccatgtttataaaccccctagccgccaccaagaacagcgggttttgtttagatcaagtttagctctcgctacttgcttgcaagcgcgcgtgctagttcagccgcccgtcttcttgtcttcggaaccccaccatattggagtttgatctttaaacctacatttagatctggtaattcagtacttgttctacttgttcttgctagttcttcgattgcttgcaggacgagtgccctagtggccagggtgtcacgctccacaagatcgtgacagccataggaggtggtgtatcggttgctaaggcgcagcgtctttggaaggctgtagtcgggccgtgaacgtcgtctcctcccccaatcgagttattccacaccctctcatcgaaagatcgggcaatcacccaacgggtgcacatcagttggtaatcagagcaaggtttatcggtgagagatttacttttcttcgctgttttcttatctcctatagtccagaaaaagccaaaaaaatagtagattagttttaccgcaatcctataaaccattgagcatttactagtactacttagttagggcttgttgagtttttggttgcatcggttgtgtcgagttgctggtcttagtttattcctttagagttttgagttctaccacgttttggtcaccacgagatccaccatcaccaaaaacatctctggttcgtttttgccaccacggatacatatcatatccgatttggaagtttaaatacaatctggaaagcttatcttatcttctttccaacggatctgaccttatctcaaaattcgttctgagcgctccgcaatcatcgtagagatttctggactttctatattaacaagatttgttaaatctgatttaaaggggttgttagcaatatctttattgtttgggttgtcatagtgaaaaaaagggtttaggcccctgcaaaaaaaaacagaagaagaagaaaaaaaaagaatagaaaagaaaaaaaaggaaaagaagaagaagggggctgaatctctaaatctgttgtttctctttgtgctgtgctagttgttctttttcagtgactacctttgtgcctaggctcacgtctctagcctggtttagcctaggaccagcacagtaccaccgttgaacgattattcagcttgcttttgtaactaacgtggtactagtgtattccttgcttcagcccacctacaactctacatatttcgactacagtttgacaggtcgtgttgctgcggcaccgatacacttattccacggttgcagacttgttggttgctgacccctcctgttgtgcaaggtaagaattggtaagagcttgtgtggcaggttgagagtgagcgccttgcagtagctacatcctaatagttgtagagtttttattccttcacatttttttttcttgttgcctctgttcgtctaaccatggcaggattggaggttgatgatgcttctcgtaatatgccacactctcctcgcaccaagggtatcatacaacactttgtaaggctggtgaaaacgcacacggaaggtcttgataatgacatgcaggtgacgaatgaaaagatggggcaattggaggccacacagatcgacacaaacaccaaacttgcaaatgtggaaatgacagttgctcatattgacaagagccttgtcgcactcttgaggcgatttgatgagatgcatgctaataccaatggtgggcgtgatgagggcgccgaaggtaactgggatgactatgttgctgatactgaacaagatgaccaagaagcacctaatcgccggcgactacgtactaaccgtagaggtatgggtggttttcaccgacgtgaggtacatggtaatgatgatgcttttagtaaggttaaatttaaaatacctccttttgatggtaaatatgaccctgatgcttacattacttgggagattgcggttgatcaaaagtttgcatgccatgaatttcctgagaatgcgcgggttagagctgctactagtgagtttactgaatttgcttctgtttggtggatagaacatggtaagaagaatcctaataacatgccacaaacttgggatgcgttgaaacgggtcatgcgggctagatttgttccttcttattatgcacgtgatatgttaaacaagttgcaacaattgagacagggtactaaaagtgtagaagaatattatcaggaattacaaatgggtatgctgcgttgtaacatagaggagggtgaggaatctgctatggctagatttttgggcgggttaaatagggaaattcaggacatccttgcttataaagattatgctaatgtaacccgattgtttcatcttgcttgcaaagctgaaagggaagtgcagggacgacgtgctagtgcaaggtctaatgtttctgcaggaaaatctacaccatggcaacagcgcacgactacgtccatgaccggccgtacactagcaccaactccctcgccaagtcgaccagcacccccgccttcctccagcgacaaaccacgtgcatcttccacaaattcagcaaccaaatctgcccagaaaccagcaggtagtgcctcttcagtagcctccacgggtagaacaagagatgttctgtgttatcgatgcaagggctatggacacgtgcagcgtgattgtcctaatcagcgtgttttggtggtaaaagacgatggtgggtattcctctgctagtgatttggatgaagctacacttgctttgcttgcggctgatgatgcaggcactaaggaaccacccgaagaacagattggtgcagatgatgcagagcattatgagagcctcattgtacagcgtgtgcttagtgcacaaatggagaaggcagagcagaatcagcgacatacgttgtttcaaacaaagtgtgtcattaaggagcgttcatgtcgtttgatcattgatggaggtagctgcaacaacttggctagcagcgacatggtggagaagcttgcacttacgaccaaaccgcacccgcatccatatcacattcaatggctcaacaatagtggtaaggtcaaggtaaccaagctggtacgaattaattttgctattggttcatatcgtgatgttgttgactgtgatgttgtgcctatggatgcttgtaatattctgctaggtagaccatggcaatttgattcagattgtatgcatcatggtagatcaaatcaatattctctcatacaccatgataagaaaattattttgcttcccatgtcccctgaggctattgtgcgtgatgatgttgctaaagctaccaaagctaaaactgagaacaacaagaatattaaagttgttggtaataacaaagatgggataaaattgaaaggacattgcttgcttgcaacaaaaactgatgttaatgaattatttgcttccactactgttgcctacgccttggtatgcaaggatgctttgatttcaattcaagatatgcagcattctttgcctcctgttattactaacattttgcaggagtattctgatgtatttccaagtgagataccagaggggctgccacctatacgagggattgagcaccaaattgatcttattcctggtgcatctttgccgaatcgtgcgccatataggacaaatccagaggaaacaaaagaaattcagcgacaagtgcaagaactactcgacaaaggttacgtgcgtgagtctcttagtccgtgtgctgttccggttattttagtgcctaaaaaagatggaacatggcgtatgtgtgttgattgtagggctattaataatatcacgatacgttatcgacaccctattccacgtttagatgatatgcttgatgaattgagtggtgccattgtcttttctaaagttgatttgcgtagtgggtaccaccagattcgtatgaaattgggagatgaatggaaaactgctttcaaaactaagttcggattgtatgagtggttagtcatgccttttgggttaactaatgcacctagcactttcatgagattaatgaacgaggttttgcgtgccttcattggaaaatttgtggtagtatactttgatgacatattaatctacagcaaatctatggatgaacatgttgatcacatgcgtgctgtttttaatgctttacgagatgcacgtttatttggtaaccttgagaagtgcacattttgcaccgatcgagtttcgtttcttggttatgttgtgactccacagggaattgaggttgatcaagccaaggtagaagcgatacatggatggcctatgccaaagactatcacacaggtgcggagtttcctaggacttgctggcttctatcgccgttttgtgaaggactttagcaccattgctgcacctttgaatgagcttacgaagaagggagtgcattttagttggggcaaagtacaagagcacgctttcaacgtgctgaaagataagttgacacatgcacctctcctccaacttcctgattttaataagacttttgagcttgaatgtgatgctagtggaattggattgggtggtgttttgttacaagaaggcaaacctgttgcatattttagtgaaaaattgagtgggtctgttctaaattattctacttatgataaggaattatatgctcttgtgcgaacattagaaacatggcagcattatttgtggcccaaagagtttgttattcattctgatcatgaatctttgaaacatattcgtagtcaaggaaaactgaaccgtagacatgctaagtgggttgaatttatcgaatcgtttccttatgttattaagcacaagaaaggaaaagagaatatcattgctgacgctttgtctaggagatatactttgctgaatcaacttgactacaaaatctttggattagagacgattaaagaccaatatgttcatgatgctgattttaaagatgtgttgctgcattgtaaagatgggaaaggatggaacaaatatatcgttagtgatgggtttgtgtttagagctaacaagctatgcattccagctagctccgttcgtttgttgttgttacaggaagcacatggaggtggcttaatgggacattttggagcaaagaaaacggaggacatacttgctggtcatttcttttggcccaagatgagaagagatgtggtgagattggttgctcgttgcacgacatgccaaaaggcgaagtcacggttaaatccacacggtttgtatttgcctctacccgttcctagtgctccttgggaagatatttctatggattttgtgctgggattgcctaggactaggaagggacgtgatagtgtgtttgtggttgttgatagattttctaagatggcacatttcataccatgtcataaaactgacgatgctactcatattgctgatttgttctttcgtgaaattgttcgcttgcatggtgtgcccaacacaatcgtttctgatcgtgatgctaaatttcttagtcatttttggaggactttgtgggcaaaattggggactaagcttttattttctactacatgtcatcctcaaactgatggtcaaactgaagttgtgaatagaactttgtctactatgttaagggcagttctaaagaagaatattaagatgtgggaggactgtttgcctcatattgaatttgcttataatcgatcattgcattctactacaaagatgtgcccatttcagattgtatatggtttgttacctcgtgctcctattgatttaatgcctttgccatcttctgaaaaactaaattttgatgctactaggcgtgctgaattgatgttaaaactgcacgaaactactaaagaaaacatagagcgtatgaatgctagatataagtttgctagtgataaaggtagaaaggaaataaattttgaacctggagatttagtttggttgcatttgagaaaggaaaggtttcctgaattacgaaaatctaaattgttgcctcgagccgatggaccgtttaaagtgctagagaaaattaacgacaatgcatataggctagatctgcctgcagactttggggttagccccacatttaacattgcagatttaaagccctacttgggagaggaagttgagcttgagtcgaggacgactcaaatgcaagaaggggagaatgatgaagacatccacactactgatgcatctataccaatacaagtaccaatttctggtcccattactcgcgctcgtgctcgtcaactcaaccatcaggtgattacactcttgagttcatgtccatcatatttagagccatggagacccgtgcactcttgttttgcttaggaatcagggagaagaccgaaagggaaaaggatttgaacatgctggattcggactgcagaagaacaccaacttgtgacggtcaccacggtcagatgcgggctcggattggaatgttcaagcacaacatggaaagcttatcaagtctactttcatatggatccggaattatagtcatatctgttctgaggccgccgtaatcattgttttcttaccgagacatttcctgccttttctgcccatggtgctgcgtcaccctattttggcccaatgggtcgtgtatcaagttaggtccattagggacgcatcctagggttgcagcacgaccccaatacccttgtggtcgtcctcccatgtttataaaccccctagccgccaccaagaacagcgggttttgtttagatcaagtttagctctcgctacttgcttgtaagcgcgcgtgctagttcagccgcccgtcttcttgtcttcggaaccccaccatattggagtttgattttgaaacctacatttagatctggtaattcagtacttgttctacttgttcttgctagttcttcgattgcttgcaggacgagtgccctagtggccagggtgtcacgctccacaagatcgtgacagccataggaggtggtgtatcggttgctaaggcgcagcgtctttggaaggctgtagtcgggccgtgaacgtcgtctcctcccccaatcgagttattccacaccctctcatcgaaagatcgggcaatcacccaacgggtgcacatcag

SEQ ID NO: 78 - DNA, 6682 bp, Zea mays
ggttccggtggcaaaaactcgtgctttatatgcaccccgttcaaatcattattctttcatgtttaaaggccagaaaataattatacatccaatgacccctgaccaaattttgaaagatgatcttactagggctgctaaaactgcacaacaagtcaaatcgacatcagccgcacctattaaatctgaaatcaagttgcactctcctgttttacttgctacacgtgctgattttgatgatctccatgaagctcatatgccctgttatgcacttgtatgctcgcgcatgcttgttccgcttgatgatgcaccgtctttggatataccccctgctgttgttaaccttttgcaggagtatgctaatgtttatcctacggacttaccaccgggtcttcctcccctccgtggcattgagcatcagatcgatctcatccccggcgcttctcttccgaaccgcgccccgtaccgtacaaatccagaggagacgaaggagatccagcgccaggtgcagacgctgcttgataagggttacattcgtgagtctcttagcccttgctcggttcctgttttactcgttccaaagaaagatgggtcatggcgaatgtgcgtagattgtcgtgctattaataacatcacagttcgttatcgatatcctattccacgccttgatgatatgttagatgaacttagtggtgccgttattttctctaaggttgatttgcgtagcggttaccatcagattagaatgaaactcggtgatgaatggaaaacggcttttaaaacaaaatttggtttatatgaatggttggttatgccatttggattgactaatgctcccagcacctttatgcgtttaatgaacgaagttctacgggccttcataggtttgtttgttgttgtttatttcgatgatatccttatttacagcaagtctatagaggagcatttagaacatttgcgtgctggttttgatgctttgcgtgctgctcgcttggttggtaacatggaaaagtgcacattttgcacgcaacgtgtcttgtttcttggttatgtggttactccgcagggcattgaggggatagcagcaagattgctgccatcgggagggcctacaccaacgacggtcacacaaattcggagctttcttggacttgccggtttctaccgcagatttgttcgtgattttagctccattgcagcgcctctacatgagcttacaaagaaagatgtgccgtttgcttggagtgattcacaggaggtagcgttcagcactttgaaagataagttaacccaagcttccctcttgcaattgtgatgagaacataacccgcacagatatgaccatgttaatggctcctgctacaaagacattgaggaacaaagaagttgattggggaccaagtaatgatatttccaacatttccaacaaagcaagcacatcatcaaatttaaagatatacttgggtgaggagcatacactagagtcgaggacgactctattacaagaaggggaggatgatgaggacatcactgccatcaatacaccacaccagcgacctccttcaccatttaataatggaccagtaaacgagtccgtgcacgtaaattttattatcaggtgaactcgttccttattgttgaagctaatcattccttaaatgaggtactaataccttgtgattactttattaatctaaggtgtttgggaggtgaaccatctagaatttgagaaggcaacaaggcaataaaagctgctccacttgaggggatttcgaaactacaacaagtgcaagtttaagagggcatatctttcagctcctaaggttgtttaatgcaaataagcacttgttggaaaggtctctttgtctactttctagtggatcaagaatcaacgagagatcagacactaagtgtccagaaactgccgagtgaactcctgctctacccaagtcaatttcgtaactgcagcatgcaccaaattaaatggagcataactttccactcccaaggttgtttagtgcaaataactacttgttggaaagctctcttcgtctactttcatgtgcatcaataatcaatgacagaaaccaaacgaggcgtccagaaactgccgagagagtttcgttctccattagaactcctttctattcctctatttaagcaactagcagccaccaaagaacttgggtttttgtttgatgtaagtttagcctttgctacttccttgtaaacgcatgtgtcggctagaccacccggatacttgaaacagaaccccaactctatcagatccgtgagtgtctgctttttatcttgttcttgcttgttctcgattgcttgcaggttcaaggctgttcttggcacggcaagggcagcaacaacaggagccgatgtaactatcgctaaggcgcagcacccttgtggttgttgtagtcggatagcacaacgtcgacctccaccccaaatcgtagttatcaggagacggtgtacctgtcgctcaaggcgccacaccatcttggttgtggtagtcgggcagccaacgtcgttctccaacaagtttccacctccatcatctctcatcgaaagatcgggcacccttctacccgttgggtttatcaagtggtatcaaatttcaggttgctcggtgagagatctcaatcttccttgttttgtttacctacagtccacttttgcccaaagatatatttagagcagaaattcacctaaaaacagtttgagcctttgctttactacttagttttcgacttgttgaattccggtagctgcatttgggtcgagttgctggtctaaagttttcttaccgctagagtttcgagttcgcgccaccttgtttcaatcaccagtttagacctcttgctgcaattcaaccaaaaagaagagaaagcaaaaggcgagtgcacaaaaaaagccgcactaatcagcaaaacaaaaaaagacacgtgcaaaacaaaagagagagaaaaaaaccagttctgaattttggtagataaaatttgtaagtgcaacaaaacaaaaggcagtttgtgtgccttctttttatagtttcagaaatcagattgttgttctgagcttttggtgatactatttgtgtaacggctcgcgtctctattacggtttggactaggaccagcacaacaccttgtggaacgtttattcaacttgttgtggctaacgtggtactagctattccttggaactattgtttaaacagccacctataaatccacaaaattttctacaacaccaccaggttgtgctagcagccactgttgttgttgttcgtgctgtttgccagcgcctcctgctttgcgtggtgagaacttgtaagaacttgtttaaccagtttgagagtgagagattacaacaatgattcctagtagtttatagaatcaaagatattttttattgtttcttgtctttactaaacatggcaggtgatatggacatttttgacccaaccgaacgttatattggaggcatcattcaacacttgcctttatatgccggtaaattcgatcctcatgcatacattgattgggagctaaagctagataaggaatttgataagcatgatctatctcaaaaacaaaagatttatattgcctctaatttgttaactgagcacgcattgatggaatggaaatacatttgtaggcacaacaaagttccacaatcttgggaagacttcaaacttcattttagagatgcattcattcctgcatactatgctgatcatttgctttctaaattagacaccttaaagcagggtgctaggactgtgaaagattattattatgattttaaaatttttaccatgtttgctcgtttagatgaatgcatggaagatgtcatgactaggttcatgaaaggactcaattctgaaattcagactatagtcatgcatgaagcatacaaacacatttctcacttgtttttgcttgcatgtaaagctgaaaatgagattctattatacaattatacaagcactgaacatgtgagccataattcctcttttgcatcttctctacatgctgatcaagaacacaaaataatgaaaccagctgttgtttttccatcatcacaagaagaattgattgctgacacttgtgatagtgaagatttgtgggataatgattcacatgtactaagacaacaactagtaaatgaacatgttacatctattattgaaccaaacattttggctaaaaaggaacatgtaatttgtattgcaaacgaaactgaagaaataaatttgctctcttctttaaatacttggggctatattgaatttgatgatctttttgagctcggtaatttggaaaatattttatttgctagattcaactataccatgtccttctcatgatatattttatattgctggcaagtacaacaacataggacaatttcttgtgcatagaatttctatttcatctagatatgttgtttcttcactttgtgcaaataagatattggtatgttctcaagaagaaaagaatctcttgtttccatgtactttagttgaagtttcaggtttatatttgaaagacattaataaaagcttagtcatcaacatcaatcatgatgcaaaaccgaggacggtttgctatcaagaaggggagaatgatgagaacataacccgcacagatatgaccatgttaatggctcctgctacaaagacattaaggaacaaagaagttgattggggaccaagtaatgatattttcaacatttccaacaaagcaagcacatcatcaaatttaaagatatacttgggtgaggagcatacactagagtcgaggacgactctattacaagaaggggaggacgatgaggacatcactgccatcaatacaccacaccagcgacctccttcaccatttaataatggaccagtaaacgagtccgtgcacgtaaatttaattatcaggtgaactcgttccttgttgttgaagctaatcattccttaaatgaggtactaataccttgtgattactttattattctaaggtgtttgggaggtgaaccatctagaatttgagaaggcaacaaggcaataaaagttgctccacttgaggggatttcgaaactacaacaagtgcaagtttaagagggcatatctttcagctcctaaggttgtttaatgcaaataagcacttgttggaaaggtctctttgtctactttctagtggatcaagaatcaacgagagatcagacactaagtgtccagaaactgccgagtgaactcctgctctacccaagtcaatttcgtaactgcagcatgcaccaaattaaatggagcataactttccactcccaaggttgtttagtgcaaataactacttgttggaaagctctcttcgtctactttcatgtgcatcaataatcaatgacagaaaccaaacgaggcgtccagaaactgccgagagagtttcgttctccattagaactcctttctattcctctatttaagcaactagcagccaccaaagaacttgggtttttgtttgatgtaagtttagcctttgctacttccttgtaaactcatgtgtcggctagaccacccggatacttgaaacaaaaccccaactctatcagatccgtgagtgtctgctttttatcttgttcttgcttgttctcgattgcttgcaggttcaaggctgttcttggcacggcaagagcagcaacaacaggagccggtgtaactatcgctaaggcgcagcacccttgtggttgttgtagtcggatagcacaacgtcgacctccaccccaaatcgtagttatcaggagacggtgtacctgtcgctcaaggcaccacaccatcttggttgtggtagtcgggcagccaacgtcgttctccaacaagttttccacctccatcatctctcatcgaaagatcgggcacccttctacccgttgcgtttatcaaattgcctgattttaatgaagtttttgagcttgaatgcgatgctagcggtattgggctaggtgctgttttgttacaagaaggaaaaccagttgcttattttagtgaaaaattaagcggtgctagtctgaaatattctacttatgataaggagctttacgctttagtgcgcactttgcatacatggcagcactatctttggcatcgtgagttcataattcattctgatcatgaggctttaaaacatattcgtacccaaacaaatctgaaccgtcgtcatgctaaatgggtcgaattcattgagtcctttccttacattattaaacccaagaccagtaaggacaacgttattgctgatgctttgtctcgtcgctataccatgctgtcacaattagattttaaaatctttggtttggacactgtgaaggatcaatatgttgacgatgctgattttaaagatgctttcggccattgtattaatgggataccatggggcaaatttcacatacaggatgggttcctgtttcgcgctaacaagttgcgtgttccagctagttcggttcgtcttttgttgttacaggaggcgcatggaggcggtctcatggggcattttggcgtctacaaaacgcatgaggtgttggctgcccacttcttttggcctcggatgcgcgctgatgttgagcgccttgttgcacgctgaaagtcgcctagagggggggtgaatagggcgaaactgaaatt

SEQ ID NO: 79 - DNA, 118 bp, Zea mays; identical to SEQ ID NO: 23

SEQ ID NO: 80 - DNA, 194 bp, Zea mays; identical to SEQ ID NO: 24

SEQ ID NO: 81 - DNA, 234 bp, Zea mays; identical to SEQ ID NO: 35

SEQ ID NO: 82 - DNA, 400 bp, Zea mays
  misc_feature (74)..(233): n is a, c, g, or t
  misc_feature (368)..(400): n is a, c, g, or t
tgagctgtcgagaataagcttgattcgttgtgaaactcacattcaattcaaacttgattcaaaataattatatnnnnnnnnnnnnnnnnnnnnnnnnnnnnnnnnnnnnnnnnnnnnnnnnnnnnnnnnnnnnnnnnnnnnnnnnnnnnnnnnnnnnnnnnnnnnnnnnnnnnnnnnnnnnnnnnnnnnnnnnnnnnnnnnnnnnnnnnnnnnnnnnnnnnnnnnnnnnnnnncgaccgcgtttcgccgcctggtgggacccccatgttggctgttccttcgaccttcagctcggtgtgtcggttgcaaccactcgccgaagattccgcgaatagctcgggattgacctgaccgattccgcgaataannnnnnnnnnnnnnnnnnnnnnnnnnnnnnnnn

SEQ ID NO: 83 - DNA, 903 bp, Zea mays; identical to SEQ ID NO: 54

SEQ ID NO: 84 - DNA, 857 bp, Zea mays
  misc_feature (1)..(603): n is a, c, g, or t
  misc_feature (779)..(821): n is a, c, g, or t
  misc_feature (827)..(827): n is a, c, g, or t
  misc_feature (847)..(847): n is a, c, g, or t
nnnnnnnnnnnnnnnnnnnnnnnnnnnnnnnnnnnnnnnnnnnnnnnnnnnnnnnnnnnnnnnnnnnnnnnnnnnnnnnnnnnnnnnnnnnnnnnnnnnnnnnnnnnnnnnnnnnnnnnnnnnnnnnnnnnnnnnnnnnnnnnnnnnnnnnnnnnnnnnnnnnnnnnnnnnnnnnnnnnnnnnnnnnnnnnnnnnnnnnnnnnnnnnnnnnnnnnnnnnnnnnnnnnnnnnnnnnnnnnnnnnnnnnnnnnnnnnnnnnnnnnnnnnnnnnnnnnnnnnnnnnnnnnnnnnnnnnnnnnnnnnnnnnnnnnnnnnnnnnnnnnnnnnnnnnnnnnnnnnnnnnnnnnnnnnnnnnnnnnnnnnnnnnnnnnnnnnnnnnnnnnnnnnnnnnnnnnnnnnnnnnnnnnnnnnnnnnnnnnnnnnnnnnnnnnnnnnnnnnnnnnnnnnnnnnnnnnnnnnnnnnnnnnnnnnnnnnnnnnnnnnnnnnnnnnnnnnnnnnnnnnnnnnnnnnnnnnnnnnnnnnnnnnnnnnnnnnnnnnnnnnnnnnnnnnnnnnnnnnnnnnnnnnnnnnnnnnnnnnnnnnnnnnnnnnnnnnnnnnnnnnaagcaaattcgacccggtcgtcggttcagggcagggtcgttaaatagccgcttatgtctattgctggtttaccggtttattgactaccggaagcagtgtgaccgtgtgcttctcaaatgcctgaggccagtttgctcaggctctccccgtggaggtaataattgacgatatgatcnnnnnnnnnnnnnnnnnnnnnnnnnnnnnnnnnnnnnnnnnnncttccnagcacagtggcgatgatatnctagaattcg

SEQ ID NO: 85 - DNA, 119 bp, Zea mays; identical to SEQ ID NO: 58

SEQ ID NO: 86 - DNA, 1802 bp, Zea mays
  misc_feature (643)..(834): n is a, c, g, or t
  misc_feature (1282)..(1765): n is a, c, g, or t
gggttttggggccgaggatcagcgagctgattcgtcgccactgtgctggaaaggtcatctaaattgaaaccgcccttttatgttatttgaattccagtcatgttcttttttcccctttcgttttacaagccttcatttgttcagcatattcattaatttatgatggatagaacttagaagtagtagcagtaacaagtacgcaaataataaacatgtatgacaataagtgaatgtgttaactatatactgaccattatgaatgtgacataagaaatagagaaatttcaaagactccatcccatcatgaattcatggtttacttacattaaacaagaatagtatacatttgtatagtggtaacagaaaaatatggcacagagcagcaattctgctcaagtccctagtgttacattataacaaagaatattcacgttatgcgagtccatttcagctgataagaacaacaagaagaattcctagtcaggaacttactcgtggcaatagcaattggtgcagttgttggccaatgttccttccatcggactagcttagcacttgacagttcaaagctgcaacactcactcgtccaacctttcccagcacattggagcttcagctgctcgaggggggggcccggtacccnnnnnnnnnnnnnnnnnnnnnnnnnnnnnnnnnnnnnnnnnnnnnnnnnnnnnnnnnnnnnnnnnnnnnnnnnnnnnnnnnnnnnnnnnnnnnnnnnnnnnnnnnnnnnnnnnnnnnnnnnnnnnnnnnnnnnnnnnnnnnnnnnnnnnnnnnnnnnnnnnnnnnnnnnnnnnnnnnnnnnnnnnnnnnnnngacgcgccctgtagcggcgcattaagcgcggcgggtgtggtggttacgcgcagcgtgaccgctacacttgccagcgccctagcgcccgctcctttcgctttcttcccttcctttctcgccacgttcgccggctttccccgtcaagctctaaatcgggggctccctttagggttccgatttagtgctttacggcacctcgaccccaaaaaacttgattagggtgatggttcacgtagtgggccatcgccctgatagacggtttttcgccctttgacgttggagtccacgttctttaatagtggactcttgttccaaactggaacaacactcaaccctatctcggtctattcttttgatttataagggattttgccgatttcggcctattggttaaaaaatgagctgatttaacaaaaatttaacgcgaattttaacaaaatattaacgnnnnnnnnnnnnnnnnnnnnnnnnnnnnnnnnnnnnnnnnnnnnnnnnnnnnnnnnnnnnnnnnnnnnnnnnnnnnnnnnnnnnnnnnnnnnnnnnnnnnnnnnnnnnnnnnnnnnnnnnnnnnnnnnnnnnnnnnnnnnnnnnnnnnnnnnnnnnnnnnnnnnnnnnnnnnnnnnnnnnnnnnnnnnnnnnnnnnnnnnnnnnnnnnnnnnnnnnnnnnnnnnnnnnnnnnnnnnnnnnnnnnnnnnnnnnnnnnnnnnnnnnnnnnnnnnnnnnnnnnnnnnnnnnnnnnnnnnnnnnnnnnnnnnnnnnnnnnnnnnnnnnnnnnnnnnnnnnnnnnnnnnnnnnnnnnnnnnnnnnnnnnnnnnnnnnnnnnnnnnnnnnnnnnnnnnnnnnnnnnnnnnnnnnnnnnnnnnnnnnnnnnnnnnnnnnnnnnnnnnnnnnnnnnnnnnnnnnnnnnnnnnnnnnnnnnnnnnnnnnnnnntttcttccccctttcctctatgatatctagattcgcg

SEQ ID NO: 87 - DNA, 294 bp, Zea mays
  misc_feature (1)..(3): n is a, c, g, or t
  misc_feature (157)..(294): n is a, c, g, or t
nnncgatggaccgcgcttgtgtgtcgcgttcagtttggcttttgccaagcagtagggtagcttcccgcgtcggtaattatatggtatgaaccatcaccttttggctctacatggtatgaacgtaagatacaaattccaactacctctagctcgccgnnnnnnnnnnnnnnnnnnnnnnnnnnnnnnnnnnnnnnnnnnnnnnnnnnnnnnnnnnnnnnnnnnnnnnnnnnnnnnnnnnnnnnnnnnnnnnnnnnnnnnnnnnnnnnnnnnnnnnnnnnnnnnnnnnnnnnnnnn

SEQ ID NO: 88 - DNA, 2540 bp, Zea mays
  misc_feature (1)..(13): n is a, c, g, or t
  misc_feature (1274)..(2203): n is a, c, g, or t
  misc_feature (2404)..(2540): n is a, c, g, or t
nnnnnnnnnnnnntgtttaactcttcgtaagaacagtggtacgtcccgtgtctatatttggcttttgttaaagccaacagtacatgcttgcgtgggtgaaaatgtgaaatgccatcgctgtgctacaacttttcggctccctcctgcttcggtgcttccacatgcccctgcacggcgtctagaaatcctaatgatttagcagcacacctgtccgcctagccgcctacgcgtacacagaaaacaatttttttgtccacacacgcgcgcgctccgagccgcagatccgagctagcgcggcgcatccgacggccacgacagcgcagtgccgtcctccgccgccaccgcttggcgattgtccgcaccccaccagtccaccacctcccccacgagcgaaaaccacggtccacggaccacggctatgttccactccaggtggaggctgcagccccggtttcgcaagccgcgccgtggtttgcttgcccacaggcggccaaaccgcaccctccttcccgtcgtttcccatctcttcctcctttagagctaccactatataaatcagggctcattttctcgctcctcacaggctcatctcgctttggatcgattggtttcgtaactggtgagggactgagggtctcggagtggattgatttggggttctgttcggagatttgcggagggaggccttggtaccggtgatcaagtgcaaaggtccgccttgtttctcctctgtctcttgatctgactaatcttggtttatgattcgttgagtaattttggggaaagcttcgtccacagttttttttcgatgaacagtgccgcagtggcgctgatcttgtatgctatcctgcaatcgtggtgaacttatttcttttatatcctttactcccatgaaaaggctagtaatctttctcgatgtaacatcgtccagcactgctattaccgtgtggtccatccgacagtctggctgaacacatcatacgatctatggagcaaaaatctatcttccctgttctttaatgaaggacgtcattttcattagtatgatctaggaatgttgcaacttgcaaggaggcgtttctttctttgaatttaactaactcgttgagtggccctgtttctcggacgtaaggcctttgctgctccacacatgtccattcgaattttaccgtgtttagcaagggcgaaaagtttgcatcttgatgatttagcttgactatgcgattgctttcctggacccgtgcagctgcggtggcaagggaggccggcaagcnnnnnnnnnnnnnnnnnnnnnnnnnnnnnnnnnnnnnnnnnnnnnnnnnnnnnnnnnnnnnnnnnnnnnnnnnnnnnnnnnnnnnnnnnnnnnnnnnnnnnnnnnnnnnnnnnnnnnnnnnnnnnnnnnnnnnnnnnnnnnnnnnnnnnnnnnnnnnnnnnnnnnnnnnnnnnnnnnnnnnnnnnnnnnnnnnnnnnnnnnnnnnnnnnnnnnnnnnnnnnnnnnnnnnnnnnnnnnnnnnnnnnnnnnnnnnnnnnnnnnnnnnnnnnnnnnnnnnnnnnnnnnnnnnnnnnnnnnnnnnnnnnnnnnnnnnnnnnnnnnnnnnnnnnnnnnnnnnnnnnnnnnnnnnnnnnnnnnnnnnnnnnnnnnnnnnnnnnnnnnnnnnnnnnnnnnnnnnnnnnnnnnnnnnnnnnnnnnnnnnnnnnnnnnnnnnnnnnnnnnnnnnnnnnnnnnnnnnnnnnnnnnnnnnnnnnnnnnnnnnnnnnnnnnnnnnnnnnnnnnnnnnnnnnnnnnnnnnnnnnnnnnnnnnnnnnnnnnnnnnnnnnnnnnnnnnnnnnnnnnnnnnnnnnnnnnnnnnnnnnnnnnnnnnnnnnnnnnnnnnnnnnnnnnnnnnnnnnnnnnnnnnnnnnnnnnnnnnnnnnnnnnnnnnnnnnnnnnnnnnnnnnnnnnnnnnnnnnnnnnnnnnnnnnnnnnnnnnnnnnnnnnnnnnnnnnnnnnnnnnnnnnnnnnnnnnnnnnnnnnnnnnnnnnnnnnnnnnnnnnnnnnnnnnnnnnnnnnnnnnnnnnnnnnnnnnnnnnnnnnnnnnnnnnnnnnnnnnnnnnnnnnnnnnnnnnnnnnnnnnnnnnnnnnnnnnnnnnnnnnnnnnnnnnnnnnnnnnnnnnnnnnnnnnnnnnnnnnnnnnnnnnnnnnnnnnnnnnnnnnnnnnnnnnnaggcaatgccagcctgccctttcgatgaggaggtacatacacgctggcgatggaccgcgcttgtgtgtcgcgttcagtttggcttttgccaagcagtagggtagcttcccgcgtcggtaattatatggtatgaaccatcaccttttggctctacatggtatgaacgtaagatacaaattccaactacctctagctcgccgnnnnnnnnnnnnnnnnnnnnnnnnnnnnnnnnnnnnnnnnnnnnnnnnnnnnnnnnnnnnnnnnnnnnnnnnnnnnnnnnnnnnnnnnnnnnnnnnnnnnnnnnnnnnnnnnnnnnnnnnnnnnnnnnnnnnnnnnn

SEQ ID NO: 89 - DNA, 153 bp, Zea mays
cgatggaccgcgcttgtgtgtcgcgttcagtttggcttttgccaagcagtagggtagcttcccgcgtcggtaattatatggtatgaaccatcaccttttggctctacatggtatgaacgtaagatacaaattccaactacctctagctcgccg

SEQ ID NO: 90 - DNA, 194 bp, Gossypium hirsutum
tttacacccctagaagactgcctaagaaaattattagcaacttattattgaaggtcataagacaagtttgagtcttggggcattgaaaccatgttatatgcacatgtatcatcaccatcaaagaagcttaattcattttacaaacagtgactccactatagcgagcccaactagctcacatgtaacttgacttg

SEQ ID NO: 91 - DNA, 210 bp, Gossypium hirsutum
ccttccatcaaagtggaaatgccagacttcgatttgttctctgacaatacagagacgacaaatcatcttagatttgcttcatcgtaaacacatgaaagccaaatcagctatatcttcgatctgctccctaccgaatacagagagataagatctgtcatcttggatctgcttcagcataaacatctgaaggtaagatctgctatgtgtctg

SEQ ID NO: 92 - DNA, 100 bp, Gossypium hirsutum
ggcgatgcagtggaacagattaaagccacatcggtgaatcttgcttccccgacattgcagttaaaaagattaaagctacaacagcgaatcttactcccca

SEQ ID NO: 93 - DNA, 8308 bp, Gossypium hirsutum
  misc_feature (393)..(393): n is a, c, g, or t
ttttttttttttatgtgagtatttgtgagaaaaaagaattttccacaatcaaaaaaaaaaaatttaccccttttttgtggagaaagggtattttttttaaaagagacattttcggattttaaatctttttttcaaacactttacaccccccttgagattaaccaaaaaaattaattgggccaaggcgcgttggttttttttccaatggggggaaactttttttggaaggggttgattaaatttaaacacataggaaacaattccccatttggggattttttgagtatttgctggattttacagcaagctcattcattaccaaatcagtaccctcgggatttaaccgaatatagctctcgttcaaatgcttcgggacaatagcccggttttatnaactcacacaatgcctttcggacttaacccggatttaacaatcgcacgaatgccttcgggacttaacccggatttaacactcgcacgaatgccttcgggacttaacccggatttaacaactcgcacgaatgcttcggggacttaacccggatttagtatctagcacaaaggccttcggatcttaatccggatatattcacttagcacaaagccttcgggacttagcccggacagcattcaattaatcatgcacatctaacaataattcatagcacattcatatttcattttcgtttacgaaactcaaacacaaggcacatattgtccttgcacattcggctcaatagccacacatagagcatgatttaatcacatcgaaatttaagatctcttactcaagaacttacctcgggtgttgtcgaacgattccgctagctattcaaccactttttccttccctttatcggttttatttcccctttgctcttgagcttaatcaaacaaataaattgatttcatcattttaggcatcaaaagatgaacacaaggcacttagcccatatttatacattagacattaaagtctcatacatgcaaaaatcatgcatcaacacaacatattagctaatttctttccccttggccgaatatgcatgtccatttttggggtcgatttcaacacttaatacacacatatacacactagtaaagcatcctcccccttttcatcgatttaacacatgcattgctcatcaacatgcaaagttacattcggccttagcacacatcttgctagccgattcttctccctttagcaaccaatgcacatatgtgctcacacaaaaatgctaaaaaggaggttcaagaatcatcaagccatcatcacatgcatcattaacaagcttcatattttgcatgcaatggcattaacacaacctccacctaggccgaatcttaactcatcctcatgcctcatcaccacaacatcaaacatcaaccaagaatgattcatccatggtcaagtgccatttccatcacatagcaagatttagaccatgggttaggtagaactcaagctaacaactaaaacatgcatgcctctcatggaacatcatcaaacataccttagcagcctagctacatgcatggccgaatctcttcacctttcttcttctttcctccttaaaatttttggccaaggatgaaccaaaggatgagaaatttttttctttgtttttctttctagtttttggcaagcatgaagatgagaaaaggatgaacacaaatttttctcctttcttctctttagctcacggcaatggggggacaaacaccacacacacatttttttttcttttgttttccatttctttattacccatactccttattttattcttccactaacaaaacatgtttcatgacatgttttgcccatccttccttgtcatggccggccactactcattaggggggggaatttgacatgcaagtcccccctttgtccacatgcactagtaggtcctcacacattgacctatcacattttagaattttctcacataagtcctattgactaaattcacatgaaatcaaccaaattgaagcttgaaattttcacacattcataattacatattctacacaataagtatcacattcaaacatttcggtgactcggtttagcggtcccgaaaccacttcccgactagggtcaactttgggctgtcacaactctcccccacttaagaaaattttcgtccccgaaaatcttaccggtaaataggtttgggtatcgttctttcatcgagctctcggtctcccaagtagcttcctcgatcccgtgtttgagccataacacctttactagcggaactcttttgtttcgcaactccttcacttcacgagctaggatacgcatcggttcttcttcatagctcatgtcgtcttgaatttcaacctctgatgggctaattatatgcgatggatcagatcgatagcgtcgaagcatcgagacatgaaagacgtcatgaatcttttcaagctccgggggcaaaatcaatctatacgcaaccgagccaactcgctcggagatttcgtacggcccaatgaatcttgggctcaacttgcccttacggccgaacctgagtatctttttccaaggtgaaaccttaaggaacactttgtctcccacatgatactcgatgtcttttcgtttcaaatctgcgtacgatttctgacgatccgtggctaccttcagactttcacggattacctttaccttctgttcagcatctctaatcaaatcaactccgaaaattttactttcaccgagctcggtccaaaacaatggtgtacggcatttacgaccgtacaaagcctcgtaaggtgccatcttaatacttgattgaaaactattgttgtaagcgaattcaatcaaaggtaaataccgttcccatgaactactgaactcgaggatgcaacatctcaacatatcctcaagtatctgaattatccgctcggattgaccatcggtttgggggtgaaaagcagtgctaaaatgcaacttggtacccagagcttcttgcaatttcttccaaaatcgtgaggtgaatctcggatctctatccgacacgatagaaacaggtaccccgtgtaatctcacaatttgataaacgtacaattcagctagtttatccaatgaaaaatccgtacgtacggggatgaaatgagccgacttagtcagtctatcaacaataacccatatcgcatccttcttacttgctgacaaaggcagtccggacacaaagtccattgtgactcgatcccatttccactcgggtatcatgatcggctggagtaatcctgaagacacttgatgttccgcgtttcacttgttgacatattaaacatctcgaaacaaagtcagagatgtcccgtttcataccatgccaccaaaattgacgtttcaaatcgttgtacattttcgtacttccccgggtgaattgacattcggctacaatgggcttcgttcagaatcatcaaaatgagttccgaattccttggaacacacaaacgacttctgaacctcaaacaatcatcatcaccaatttgaaactccgattccttattcggaacacactcagcccgttttgcaaccaattcatcatcaactttctgagcttcacgaatttgatgaatcaataatggtttggcttttaattcagctactaacacattgtcaagtagaacagaccagtgcacattcatcgctcgtaaagcaaacaatgatttccggcttaaggcgtccgcaaccacattagcctttcccgggtggtaatcaatgacaagctcgtaatctttcaacaactcaagccaacgtctttgtcgcagatttaagtctctttgagtcatcaaatatttgagacttttgtgatccgaaaatacatggcacttttcaccaaataagtaatgtcgccatatttttaaagcaaatacgatggcagctagttcaagatcatgggtcggataatttttctcatgtggctttaattgtctcgacgcataggccacaactcgaccttcttgcatcaatacgcaacccaacccaagtagggatgcgtcactataaatgacaaactcttttcctgattcgggttgcactaaaaatggaagctccatccaaaaaaatttttcagttgaatctaaaccttttctgacatttctccgtccattcgaacttaacatccttttgaagtagcttcgtcattggtgtggctatcatcgagaaaccttttacaaatcgtcggtaataaccggtgagccccaggaagctccgaacttcggtaatatttcttggaggcttccagttaagtatggctgaaattttgctcgggtcaactcgaatacccgatgcggatcccacatgacccaaagatgctaacctcttttaaccagaactcacacttactgaacttagcatataactgcttatcccgtaaaatttacaacactaatctcaggtgctcagcatgttcagtctcatctcttgaatagaccaagatgtcatcaatgaacacaactacgaaccgatccaaatatgggtctgaggatccgattcatcaaatccataaataccgcaggggcattagtgagccaaaacggcatcactaagaactcgtagtaacagtatctagttctaaaagcagttttgggtatatccgaatctcgaattcgcaattggtaataactcgatctcaaatctatctttcaaaacactgaggctccctttagttgatcaaacaaatcatcaatacgcggtaacggatatttattctttatcgtcactttattcagctaacgatagtcaatgcacaacctcatggttccgtccttctttttcacaaacaatactggtgcaccccaaggtgagaaacttggtcgagtgaaacctctatccgtcaactcttgcaactgagctttcaaatgttttaactcggttggttccatacgatacggagctatcgaaattggcatagttccaggtacaagctcaataccaaactctatctcccgaacaggtggcaaacccggtaactcttcaagaaacacatccgggtattcacagatcactcggcaccgattcgggtttcttttctaactccttgtcatcaagtacatacgcgaggtatgcttcgcacccttttcttacatatttctgggccaacattgccaatattacagctggcaatccccttaagtccgtagactcaattcgaattatctcgttatttgcgcacctcaaatcaatagtcttttcttttgcaattcacaactgcatcatgaacggtcaaccaatctttttcgagaataacatcaaattcatcaaacggaaaaagcatcaagtccgccggaaaacgggaacctcgaattactagggggcatttcttacacactttgtcgacaagcacgtaacgacccaagggatttgacaccagaattacgaactcagtagactcaataggtaaagtcttactggatgctaaggtttcgcatatataagaatgagtagaaccagggtcaatcaaagcaatcacattagtatcaaagagagtaaaagtaccggtaataacatctggcgaggaagcatcctcgcgtgcgcgtatagcataagccttagcaggagcgcgagcctcggatctagtcgtagcatctatagatcctctctgaccacccctagcattgcccgtatttctagatggtctacctcgaacagtggtagcacccggtttctcgctttgatttatattctgttcagacaacctcgggcaatcctttattgaagtggtcaactgatccgcacttgtaacagggagcgatcatggaatctacaactccccgaatgccatttaccacaatactggcactctgctctgtctcgacgatcatttccaccactggcgaccgaagtgactcgtgcactcacagggggtcgatcgcgatctcgtctagaaaagccagaaagtgtttctagatcggcctaaatcatctctaaaatttcttcgatgactgtttgaaagggctttcccgaagatctcttacgaaactcttttgctcctacatcagctttccttttatccttactgagctcctcggctttgcaagctcgctcgacaagtaccacaaattctcggatttctaaaatgccaacacacagcttttatatcatcattcagtccatcctagaaccatttacacatcacggcctctgaagaaatgcattctcgcgcgtatcggctaagcctcacaaattttcgttcaatagtcggtaaccgacatggaaccttgtttgagttcaagaaattcctttcgtttttggtcgatgaatctatgactgatatacttctttcaaaactcaaaaaaaagaactcccaagttacttactctctgggcacaacagaagtcaacgtattccaccaatagtaggcagaatcatgtagcaaggagataatacactttaggcactcatcgggtgtgcaagatagctcatcgagtacccgaatagtgttgtccaaccaaaattcagcttgctcggcatcatcgctatccgtagccttaaattcagtagccccgtgttttcgaattctgtcaattgggggcttacttgaccttatttggtcagttgccggaggtattgtaggtgcgggggtggcattagttcggaatggaggttgctgcgaacagccgtattagttcgaatgtattggttgaaacaatcattcatcatgctataaaaagcttgtctagcttcatcatttggattactagcaataggttgagagtccgccggagctgtcccttgtgcgggagcaggcgctacactctcaagatcatcagctaccgctcggtcgggattgggatccattactataaataaacacatttgcaaatgtcagaaatcaccacactatcaattaatcacataaaatggcatgtatagttagaccccaacacattacggtagtcctagaaacgactaccaccgtagctctgataccaatcaaatgtaacaccccgaacccgagatcgtcaccggagtcggacacgagatgttaacaaactttgaaaaaaattttttccagacactgcccagtctgagtactagtcgcttcaaaaatcatatcttgagtttcacaactcaaaaatcagttttgtatttttccctgaaacaagactcatgtccccacctatggatttttttctggaatttttggttgggccaactagtacagtttattagtcaaagtctcccatgttacaggggtcgactacactgaccttttcccattacgactgggatatctctctgcacagagcttcaatactgatgccgtttgtttctatggaaactagactcagagaggaatccatacatatatggtatgacccctaattatctctggtcaatttatagtgaatttccaaaggcggaacagtgaatcccagaaactgttctggccctgttccacaagaaccggaatatctctttctgtactgttcctataattgtttcgttacttccatatgaaagtagattcatcaaggtttgattacataatttattcactatttaattccactcctacgaatttatgtgatttttcaattctacaccactgttgctgtcaaaatctgttttcaagataaactttacctattttgtggtcaccatggaccaactaggattttgccctacataggtccacatgtgatcatatttagccattccaatggctgatcattagcccaacacttccatttcaaaccatagtcacatcatgaaaccatatatatacatacatacacacaaatggtctaatgccatactccacttttacaagccattttcgcatggctgtacacttatacatttcataaagtactcgaaagacaacaatgggtagtcctatacatgccatatcaaaattcaaccaaaatagtacccaaaagagcctttgaaagtggggggcgacttccactttcaaattcccaagtccgaatagctggaaaaccaaaaatcttttaaaaaaaagaaccaatgtaaacagtaagccattttttgcttataaagtttgagcaaagaaatcccgccttaaaaaaaaaattccaacaatttagctaaagggaaaatttttataaaatcccattttttcgatatttaaattttgtttccaaaaattaaaaaaccctttgggtaaataacccaaaaaaaataaattataccaaaagggcgggtaccctgttttatctcctgggggggaaaaaatttttttttttagagggcgtgcgatatatatttttcaaacaaacacctattataaaattctccccccctaattttgggtggatggttttt

SEQ ID NO: 94 - DNA, 5788 bp, Gossypium hirsutum
tgaaggcagagagaaagaaaaaaaagaggaataaggctatagaggagaatatgaggtaggagaagagggtaatggggttgagaaaaatagaaggggacacagagagattagagaggcaaagagaagatagagctatggtgtgtagataagagttagaaaataatattcgatgcatagctagttaaggataaagagattggtactgagtgttaagttgagtgttttctcggagagagttgaaaggaaaagcggacctgcaactcttcgcacgcggccgcagggaagaagagtataacagaggtaaaatagaaaataaaaaatataaggggtaaaataaaatgatatcgaagggatagcataaaaaaggtctccaaggtaaagcgttaaaagttattttttaatcgtcataaattactaggggcattagaagaggcgatagtcttaaatacccattcaaacaattacaaatttaggtataaagtataattttcggttcatcccttttcccgtattggaatttgatgataatggctttttaaaacaattttagggaatataattgaaccatgtaattcatcaagtctaggaattggatgtctatactttactgttattttgttgattgggcggcaaacaacacacattctatacgtaccatctttcttcggtaccaataagacaggaacggcacaatggcttaggctctcacgaatgtaccctttgtctagtaactcctcaacttgcctttgcaattcctttgtctcctcgggattgcttctataggctggtcgatttggcattgaagctcctggtactaagtcaatctagtgttctatcccacgtaaaggtggtaaacctttaggggcctcactaaaaacatcctcataatcctgcaaaagacattgaaccacactaggcaaattttcattaatgttagatagagataaatagttttgcctaaacctcacaaggatacaaggctgtttattgagtagggctctccgcacatctttttttgttgcaattaaaattttcactctagttttatcacttgcggattcactcacctttgattcatttaaaatttgacttttttcactactagcatcttttctctctgtcttttttatttgtcctttcttcctcaccccctcacaaaatttcatcatttttaattgatctttatatacatcattgggatttaaaagagcaaaagtgaattttcggcctttaaacacaagagagcttacctttgtgtgtaacatcacgatcaaattgccaaggccgtccaaggagaaagtgtgccgcatgcattgatgaccacattacaccatagatcatcctcgtaattcttaagctatatagtgagtgaggtactattttgtaaactttaactttcgagcaattcataagccactgaaggtgatacggcttagggtgctcgatacaaggtaactttaaggaatccaccaaatagctgctaactacattcgaacaactcccactatcaataataagtgaacataagttaccttttataaaacaccctagaatggaaaatattggtcctttggttctcaaaatcgtctttcatttggatgttaagggtgcggtttactaccatcttattttttttcctctttttttttgaaatacctgtaaaacaaatactcaacactcaaaagaaaaattagcaaacctcaccgttagtcactcaaaaagaaaaatcaaattctcaatgaggtagaattcagtcttgtgagttctttagtagagtctatatcaaccaattagaaagtgtatgaaccgaaactaccaaagagtcctaatttgcactaagatgccaaaaactgacgagacaccaattaatttgtgttgcaccgaggaagaattgtgcacaccttaaaatcctactaacacaagaaacaagaaggtgttagatagtgtaaaggaagaataaaggcaaacaaatgaaaacctacagctaagaatcaataaaaattgctgaaatcgaaaaacccaaaaaactgcggagtaacttgacaacttcgttcgaggtgttcccgatctccaaaaatcacaaaattaaatctagaatgtccttaaatattgaatttttgatctggaaagtttgggcaccaaactcaacccgctgaatcttttttaaaatttttatttgatttcgtctttttcaatttttttgactttttcgaatgacgtttttgcgggaaatatttttttatattcaataacagtgccaaaaatatgtatgtaaaattttagatcaatcagacaacgtttacccactcaaatgaattttttttgaacaatttttctgggtaaaactgctgtttgtgctttaaaaaatagagatcagtttagaaatcaaccaggaacacccaaaacgcccaaaatctgataccaaatgatacgggggttgcgcgcggaccaagatcgagttgccaagtcacgagaaactcctaattattttaatatggaaattcggtcaaaggtcattttatctgggactcttggactgaatattgacataaaaatttaaactaagtaaataaataaataaataaagaaaaataaaaataaaactttacaacttgggccactttgacaatttggcctgatttttttaacaatttggcctgattttcaactaagtatggatggatttcttgattgggctgggaatttgcttattgggcctcgccttcaagaatttgggcttttgtgactcgtatcattccccccttcctcaaaaagattcgtcctcgaatctgaaaaatcaaatgaactcgactttcctctatcgaacgggactaatggcaattgagtccactgaaaagaatagccatgagatagtaaatagcaacggaaacaagcttgtagtccaatcataagcataacagaacaggtataacgcatgtgaatggacagattcagattaccatgcaaacaatctaatttactcaccactgcctcgtcaaatatttgaaacaaagatggacatgttttaaggcattcagtcgtctcacattgttcccacaaaccatgaataaattgcgagtaataaatcaaatggtaaacataatcgtcacaagtaggtatttgaaaagattcacatggttcacagagttgcataatcataccatgcattaatcgacggtctatagattcactcacacatgcattatcaaaaacaagaatctttttatcaaccatcaaaacagatagatcatcaataaataaaataggacagtcaagcacgtttcgatctaagtgttcatcaacacgatctttatcactatccgaggagtacaaaagtgtttcaaaggtttcaagcatcttacctcgataagcagaagaataagggtcgattttacctttttcatttaaaacaaaccttcgctcatcgggggcatagtgtagtcgaatctccgttgttgagttaacctttgtcaaatggaactcaaacttcatgtacaaccacataaactgtttaaggcacgaatataaattgaaaacaaatttggaaaatttcgttaccttattctccaaaacagatttggacaaattcgaggattttacacaaggtaaatcaagagaataacaaatcacgcttcttttcgtaatgactttatcaaccacaatcgaagagtaacaattaatcggatcaaaatgaggggatcttttaagaactaagtcaccaaaagttttatcaataattttcaaatctgcactggactcggtttctaaaatttccttacctcgcttaccttcgggatcatgtagtgtgatttcatctttgcctaagttgatcgtatgaaagcgtctttcatttgagaggtattgaagttgaaagttatctttcgatctttcgggaacctgaaaagtagcaacacaagaaaaattcatatcttggttagtggaaacattcctcactaccctttccacgtctttttcttttgtttctttttctaattcattttctcttctttcttcaatttctttttcaattttcttttctgtttcacattccttttcactctcaatctctttttgctctttttcattctctttttctttttcctcacttgttttaacagaatttttcagtttgatttggtcctcatggacttgttccggagtgagcggcactaaggtgagtttctttccttgatgcttgaaagaatacctattggtacgaccatcgtgagtgacttttcgatccagttgccatggttctcctagcaacaaatggcaggcttgaataggcattacgtcgcacacaacttcgtcttgatacttaccgatagaaaaggcgatgcgcacttgttgagtgaccctaaattggccttcgttgctaagcccttgtagttgataaggttgtggatgcttggtagtggttaagcaaagcttttccaccatcgtcgtgctggctatgttcgagcaactttcaccatcaataataactctacaaagcttaccttgtacatggcagcgagtatgaaagagatgttctcgttgctgctcgctctttggttttgccaaagatgattgtccacgatcatgaaaatcatcatccattctagggacacgttgagggctgcacctatagggctggttatccctatcttccttaattggatctcgatattgatgtttttgattcactcgtacctcattcaaagtagtattcaatgcttgaagtgtagcatttatttgtgtgattgcagcagtatgttcgtctaactgttgttggactttcataagtgcatcattattatcacctttagacatcttcaaaacctgtaaaaagtaaacactcaacactcaaaaataaaagttagcaaacctcaccattaatcactcaaaaagaaaaatcaaattctcaatgaggtcgaattcaatcttgtgagttctttatcagagtttatatcaaccaattagagagtgtgaaccaaactaccaaagaatcctaatttgcactaggatgccaaaaactgacgagacaccaagtgattcgtgttgcaccgaggaaggagttgtgcacacgtgtaaatccaactaacacaagaaacaagaaggtgttagataacgtaacggaagaataaaagcaaacaaatgaaaacctacagctaagaatcaataaaaattgctgaaaatagaaaacccgaaaaactgcggagtaacttgacaacttcgttcgaggtgttcctgatctcaaaaaatcacgaaattaaatctttgaatgttcttatatatagaattttttatctggaaattttgggcaccaaattcaaccccgctgaatctttttttaaatttttaattgaatttcatcttttttttatttttttggacttttttgactaatttttttgggggcaataatttttttttattttcaatccccaggggcccaaaaactgtgttggtaaaatattttcaaaataaatcgaaaaaacttttaacccccctccaaatggaattttttttttaaaaaaatttttttttggggaaaaaactgtgctggttttttggtttttaaaaaaaaaataaaaaatttcgtttttaaaaaaatctaaccccagaaaaaaccccccaaaaaaccccccaaaaaaattttaataccccaagggggtataacgggggacgccccccgcgggacaccccaaaaataacgcaagttttttccccaagaatctccccccggaaaaaaaaactccccccttctctaaaaaaaaaaaaaaatttttcttataaaaaaaaaaaa

SEQ ID NO: 95 - DNA, 2836 bp, Gossypium hirsutum
ttccccccttcctcaaaaagattcgtcctcgaatctgaaaaatcaaatgaactcgactttcctctatcgaacgggactaatggcaattgagtccactgaaaagaatagccatgagatagtaaatagcaacggaaacaagcttgtagtccaatcataagcataacagaacaggtataacgcatgtgaatggacagattcagattaccatgcaaacaatctaatttactcaccactgcctcgtcaaatatttgaaacaaagatggacatgttttaaggcattcagtcgtctcacattgttcccacaaaccatgaataaattgcgagtaataaatcaaatggtaaacataatcgtcacaagtaggtatttgaaaagatttacatggttcacagagttgcataatcataccatgcattaatcgacggtctatagattcactcacacatgcattatcaaaaacaagaatctttttatcaaccatcaaaacagatagatcatcaataaataaaataggacagtcaagcatgtttcgatctaagtgttcatcaacacgatctttatcactatccgaggagtacaaaagtgtttcaaaggtttcaagcatcttacctcgataagcaaaagaataagggtcgattttacctttttcatttgaaacaaaccttcgttcatcgggggcatagtgtagtcgaatctccgttgttgagttaacctttgtcaaatggaactcaaacttcatgtacaaccacataaactgtttaaggcaagaatataaattgaaaacaaatttggcaaatttcgttaccttattctccaaaacagatttggacaaattcaaggattttacacaaggtaaatcaagagaataacaaatcacgcttcttttcgtaatgactttatcaaccacaatcgaagagtaacaattaatcggatcaaaatgatgggatcttttaagaactaagtcaccaaaagttttatcaataattttcaaatctgcactggactcggtttctaaaatttccttacctcgcttaccttcgggatcatgtagtgtgatttcatctttgcttaagttgatcgtatgaaagcgtctttcatttgagaggtattgaagttgaaagttatctttcgatctttcgggaacctgaaaagtagcaacacaagaaaaattcatatcttggttagtggaaacattcctcactagcctttcctcgtctttttcttttgtttctttttctaactcattttctcttctttcttcaacttctttttcaattttcttttctgtttcacattccttttcactctcaatctctttttgctctttttcattctctttttctttttcctcacttgttttaacagaatttctcagtttgatttggtcctcatggacttgttccggagtgagcggcactaaggtaagtttctttccttgatgcttgaaagaatacctattggtacgaccatcgtgagtgacttttcgatccagttgccatggttctcctagcaacaaatggcaggcttgaataggcattacgtcgcacacaacttcgtcttgatacttaccgatagaaaaggcaatgcgcacttgttgagtgaccctaaattggccttcgttgctaagcccttgtagttgataaggttgtggatgcttggtagtggttaagcaaagcttttccaccatcgtcgtgctggctatgttcgagcaactttcaccatcaataataactctacaaagcttaccttgtacatggcagcgagtatgaaagagatgttctcgttgctgctcgctccttggttttgccaaagatgattgtccacgatcatgaaaatcatcatccattctagtgacacgtcgagggccgcgcctttggggttggttatccctatcttccttaattggatctcgatattgatgtttttgattcactcgtatctcattcaaagtagtattcaatgcttgaagtgtagcatttatttgtgtgattgcagcagtatgtccatctaactgttgttggactttcataagtgcatcattattatcacctttagacatcttcaaaacctgtaaaaaataaacactcaacactcaaaaataaaagttagcaaacctcaccattaatcactcaaaaagaaaattcaaattctcaatgaggtcgaattcaatcttgtgagttctttatcagagtttatatcaaccaattagagagtgtgaaccaaactaccaaagaatcctaatttgcactatgatgccaaaaactgacgagacaccaattgattcgtgttgcaccgaggaagaagttgtgcacacgtttaaatcctactaacacaagaaacaagaaggtgttagataacgtaaaggaagaataaaggtaaacaaatgaaaacctacagctaagaatcaataaaaattgctgaaaacagaaaacccgaaaaactgcggagtaacttgacaacttcgttcgaggtgttcccgatctccaaaaatcacgaaattaaatctggagtgtccttatatatttaatttttgatctggaaaatttgggcaccaaattcaacccgctgaatatttttttaattttttattggatttcgtcttttttcaattttttgactttttcgacttatttttttgcgggaaatatttttgtatattcaataacagtgccaaaaatatgtatgtaaaatttcagatcaatcagaaaacgtttacccactcaaataaatttttttcgaaaatttttctgggtaaaactgctgtttgtaatttaaaaaatagagatcagtttagaaatcaaccaagaacacccaaaacgcccaaaatctgataccaaa

SEQ ID NO: 96 - DNA, 982 bp, Gossypium hirsutum
tgatacggggttgcgcgcggaccaagatcgagttgccaagtcacgggaaactcctacgaaaacccttaaacaattagatctgaaacgaaacagaaaattaaaagattagatttttgaattttcagatctgaaataaaatccccaaatcagcaaagaatcaaattgagaatagaaataagtgttagggttcttgaaaccctcaaggagattgtgattctgcccaattgaacactaagatagttttccccaaatttcgacaatctaatttcacccaaaaagagtatggaaaaaccctagaaattggggatttttgggctgattccttaagatagaaaaaggctgaaaacacaataagaacagaaaatagattagataatgattcagcacaagtagaaataaagaaagaattgacagtaagaaattaaaagataagtcctaagaagccttgaaatctcgaaagatctcacaactcccttcaaacggctctaatctcccctccaaagaatatcaatggcaagaagaaggttgaagatggctcccacaatcaaaaagattgttaaaacaacttctaaagaaaactcaagagaaaatccttgaagaactcaaagagaattttcactcaaatcaaatctgaaattttcaatgtaattgtaatgtaatgtagggtggctggccaagccatataaataggcctttcaaatgttttcctaatttaattagaacactaaaactaaaactaaaaaaaactcctaattattttaatatggaaattcggccaagggtcttttatttgggactcttggactgaatataaaaatttaaactaaataaaataaataaataaaaataaaactttacaacttgggccactttgataatttggcctgattttcaactaagtatgggtggatttcttgattgggctgagaatttgcttattgggcctcgccttcaagaatttgggcttttgtgactcgtatca

SEQ ID NO: 97 - DNA, 4800 bp, Gossypium hirsutum
tgatacggggttgcgcgcggaccaagatcgagttgccaagtcacgggaaactcctacgaaaacccttaaacaattagatctgaaacgaaacagaaaattaaaagattagatttttgaattttcagatctgaaataaaatccccaaatcagcaaagaatcaaattgagaatagaaataagtgttagggttcttgaaaccctcaaggagattgtgattctgcccaattgaacactaagatagttttccccaaatttcgacaatctaatttcacccaaaaagagtatggaaaaaccctagaaattggggatttttgggctgattccttaagatagaaaaaggctgaaaacacaataagaacagaaaatagattagataatgattcagcacaagtagaaataaagaaagaattgacagtaagaaattaaaagataagtcctaagaagccttgaaatctcgaaagatctcacaactcccttcaaacggctctaatctcccctccaaagaatatcaatggcaagaagaaggttgaagatggctcccacaatcaaaaagattgttaaaacaacttctaaagaaaactcaagagaaaatccttgaagaactcaaagagaattttcactcaaatcaaatctgaaattttcaatgtaattgtaatgtaatgtagggtggctggccaagccatataaataggcctttcaaatgttttcctaatttaattagaacactaaaactaaaactaaaaaaaactcctaattattttaatatggaaattcggccaagggtcttttatttgggactcttggactgaatataaaaatttaaactaaataaaataaataaataaaaataaaactttacaacttgggccactttgataatttggcctgattttcaactaagtatgggtggatttcttgattgggctgagaatttgcttattgggcctcgccttcaagaatttgggcttttgtgactcgtatcattccccccttcctcaaaaagattcgtcctcgaatctgaaaaatcaaatgaactcgactttcctctatcgaacgggactaatggcaattgagtccactgaaaagaatagccatgagatagtaaatagcaacggaaacaagcttgtagtccaatcataagcataacagaacaggtataacgcatgtgaatggacagattcagattaccatgcaaacaatctaatttactcaccactgcctcgtcaaatatttgaaacaaagatggacatgttttaaggcattcagtcgtctcacattgttcccacaaaccatgaataaattgcgagtaataaatcaaatggtaaacataatcgtcacaagtaggtatttgaaaagatttacatggttcacagagttgcataatcataccatgcattaatcgacggtctatagattcactcacacatgcattatcaaaaacaagaatctttttatcaaccatcaaaacagatagatcatcaataaataaaataggacagtcaagcatgtttcgatctaagtgttcatcaacacgatctttatcactatccgaggagtacaaaagtgtttcaaaggtttcaagcatcttacctcgataagcaaaagaataagggtcgattttacctttttcatttgaaacaaaccttcgttcatcgggggcatagtgtagtcgaatctccgttgttgagttaacctttgtcaaatggaactcaaacttcatgtacaaccacataaactgtttaaggcaagaatataaattgaaaacaaatttggcaaatttcgttaccttattctccaaaacagatttggacaaattcaaggattttacacaaggtaaatcaagagaataacaaatcacgcttcttttcgtaatgactttatcaaccacaatcgaagagtaacaattaatcggatcaaaatgatgggatcttttaagaactaagtcaccaaaagttttatcaataattttcaaatctgcactggactcggtttctaaaatttccttacctcgcttaccttcgggatcatgtagtgtgatttcatctttgcttaagttgatcgtatgaaagcgtctttcatttgagaggtattgaagttgaaagttatctttcgatctttcgggaacctgaaaagtagcaacacaagaaaaattcatatcttggttagtggaaacattcctcactagcctttcctcgtctttttcttttgtttctttttctaactcattttctcttctttcttcaacttctttttcaattttcttttctgtttcacattccttttcactctcaatctctttttgctctttttcattctctttttctttttcctcacttgttttaacagaatttctcagtttgatttggtcctcatggacttgttccggagtgagcggcactaaggtaagtttctttccttgatgcttgaaagaatacctattggtacgaccatcgtgagtgacttttcgatccagttgccatggttctcctagcaacaaatggcaggcttgaataggcattacgtcgcacacaacttcgtcttgatacttaccgatagaaaaggcaatgcgcacttgttgagtgaccctaaattggccttcgttgctaagcccttgtagttgataaggttgtggatgcttggtagtggttaagcaaagcttttccaccatcgtcgtgctggctatgttcgagcaactttcaccatcaataataactctacaaagcttaccttgtacatggcagcgagtatgaaagagatgttctcgttgctgctcgctccttggttttgccaaagatgattgtccacgatcatgaaaatcatcatccattctagtgacacgtcgagggccgcgcctttggggttggttatccctatcttccttaattggatctcgatattgatgtttttgattcactcgtatctcattcaaagtagtattcaatgcttgaagtgtagcatttatttgtgtgattgcagcagtatgtccatctaactgttgttggactttcataagtgcatcattattatcacctttagacatcttcaaaacctgtaaaaaataaacactcaacactcaaaaataaaagttagcaaacctcaccattaatcactcaaaaagaaaattcaaattctcaatgaggtcgaattcaatcttgtgagttctttatcagagtttatatcaaccaattagagagtgtgaaccaaactaccaaagaatcctaatttgcactatgatgccaaaaactgacgagacaccaattgattcgtgttgcaccgaggaagaagttgtgcacacgtttaaatcctactaacacaagaaacaagaaggtgttagataacgtaaaggaagaataaaggtaaacaaatgaaaacctacagctaagaatcaataaaaattgctgaaaacagaaaacccgaaaaactgcggagtaacttgacaacttcgttcgaggtgttcccgatctccaaaaatcacgaaattaaatctggagtgtccttatatatttaatttttgatctggaaaatttgggcaccaaattcaacccgctgaatatttttttaattttttattggatttcgtcttttttcaattttttgactttttcgacttatttttttgcgggaaatatttttgtatattcaataacagtgccaaaaatatgtatgtaaaatttcagatcaatcagaaaacgtttacccactcaaataaatttttttcgaaaatttttctgggtaaaactgctgtttgtaatttaaaaaatagagatcagtttagaaatcaaccaagaacacccaaaacgcccaaaatctgataccaaatgatacggggttgcgcgcggaccaagatcgagttgccaagtcacgggaaactcctacgaaaacccttaaacaattagatctgaaacgaaacagaaaattaaaagattagatttttgaattttcagatctgaaataaaatccccaaatcagcaaagaatcaaattgagaatagaaataagtgttagggttcttgaaaccctcaaggagattgtgattctgcccaattgaacactaagatagttttccccaaatttcgacaatctaatttcacccaaaaagagtatggaaaaaccctagaaattggggatttttgggctgattccttaagatagaaaaaggctgaaaacacaataagaacagaaaatagattagataatgattcagcacaagtagaaataaagaaagaattgacagtaagaaattaaaagataagtcctaagaagccttgaaatctcgaaagatctcacaactcccttcaaacggctctaatctcccctccaaagaatatcaatggcaagaagaaggttgaagatggctcccacaatcaaaaagattgttaaaacaacttctaaagaaaactcaagagaaaatccttgaagaactcaaagagaattttcactcaaatcaaatctgaaattttcaatgtaattgtaatgtaatgtagggtggctggccaagccatataaataggcctttcaaatgttttcctaatttaattagaacactaaaactaaaactaaaaaaaactcctaattattttaatatggaaattcggccaagggtcttttatttgggactcttggactgaatataaaaatttaaactaaataaaataaataaataaaaataaaactttacaacttgggccactttgataatttggcctgattttcaactaagtatgggtggatttcttgattgggctgagaatttgcttattgggcctcgccttcaagaatttgggcttttgtgactcgtatca

SEQ ID NO: 98 - DNA, 7 bp, Artificial sequence
  plant telomere repeat
taaaccc

SEQ ID NO: 99 - DNA, 85 bp, Gossypium barbadense
cccttggccgtgcgggagcctctagcaccatcggcaccttggtgcttggatgtccgagaacctcgcgcaccatcgacaacctagg

SEQ ID NO: 100 - DNA, 20 bp, Artificial
  synthetic oligonucleotide
gagtcttggggcattgaaac

SEQ ID NO: 101 - DNA, 20 bp, Artificial
  synthetic oligonucleotide
gagctagttgggctcgctat

SEQ ID NO: 102 - DNA, 20 bp, Artificial
  synthetic oligonucleotide
agtggaaatgccagacttcg

SEQ ID NO: 103 - DNA, 20 bp, Artificial
  synthetic oligonucleotide
gctgatttggctttcatgtg

SEQ ID NO: 104 - DNA, 20 bp, Artificial
  synthetic oligonucleotide
ccccgacattgcagttaaaa

SEQ ID NO: 105 - DNA, 20 bp, Artificial
  synthetic oligonucleotide
tggggagtaagattcgctgt

SEQ ID NO: 106 - DNA, 679 bp, Artificial
  probe
gacatgttttgcccatccttccttgtcatggccggccactactcattaggggggggaatttgacatgcaagtcccccctttgtccacatgcactagtaggtcctcacacattgacctatcacattttagaattttctcacataagtcctattgactaaattcacatgaaatcaaccaaattgaagcttgaaattttcacacattcataattacatattctacacaataagtatcacattcaaacatttcggtgactcggtttagcggtcccgaaaccacttcccgactagggtcaactttgggctgtcacaactctcccccacttaagaaaattttcgtccccgaaaatcttaccggtaaataggtttgggtatcgttctttcatcgagctctcggtctcccaagtagcttcctcgatcccgtgtttgagccataacacctttactagcggaactcttttgtttcgcaactccttcacttcacgagctaggatacgcatcggttcttcttcatagctcatgtcgtcttgaatttcaacctctgatgggctaattatatgcgatggatcagatcgatagcgtcgaagcatcgagacatgaaagacgtcatgaatcttttcaagctccgggggcaaaatcaatctatacgcaaccgagccaactcgctcggagatttcgta

SEQ ID NO: 107 - DNA, 628 bp, artificial
  probe
tcaaatctgcactggactcggtttctaaaatttccttacctcgcttaccttcgggatcatgtagtgtgatttcatctttgcctaagttgatcgtatgaaagcgtctttcatttgagaggtattgaagttgaaagttatctttcgatctttcgggaacctgaaaagtagcaacacaagaaaaattcatatcttggttagtggaaacattcctcactaccctttccacgtctttttcttttgtttctttttctaattcattttctcttctttcttcaatttctttttcaattttcttttctgtttcacattccttttcactctcaatctctttttgctctttttcattctctttttctttttcctcacttgttttaacagaatttttcagtttgatttggtcctcatggacttgttccggagtgagcggcactaaggtgagtttctttccttgatgcttgaaagaatacctattggtacgaccatcgtgagtgacttttcgatccagttgccatggttctcctagcaacaaatggcaggcttgaataggcattacgtcgcacacaacttcgtcttgatacttaccgatagaaaaggcgatgcgcacttgttgagtgaccctaaattggcc

SEQ ID NO: 108 - DNA, 195436 bp, Gossypium hirsutum
aagcttgaaataggttttcaaggctaaaatctgacctattaaggcaaggtttagaatagggaaatagaatgatttcattgtgagctaccatctaccgatttcaatggtggattggtggtgagtgaacggcagattgaaaaggggcaaacatctagggttttccctttcttttcccccatttgtttgctgcgctgcttagatttgttttaagtgtttttttttcttttttttaattggcaaaaagaagtgacgtctgattcttcttcttcaagcgtgtttttagcggggagggataattcacgctaggtccttcttcttcgcatgggcatttaattgcactccatttactttatttagttttcaaattcggttctattatttgtgcatatatgcaaattgatccgcaccacaacgcagtgttttgggacctggattatttccatttctagtccctgtgcatttgcatgcatggcgtgcgggtcttaattttaacctcaatgacttattttatttgtgaattatctcctttattttagttcaatttaaattaagtttgtataacttattatcttgaaattcatttaatatttttatatatgtgttgatctattttaataaatttatataattatgttgaagttttttttatattctataattttaacattttgcgtggtattcggttcaaatctttttatgggcttgaacttatattattgaatcttttattcattctgattttgaaaatccatttagttttttatacgttaaattattttggtaattttactttatgttataaaatcattattttgaaatttatttttatatcatattattttaactatttatataatgttttgtttaaatattttttgtgtatatttatatgtaaattattttaatggagttttaatttaaaatacttattgttttaagattcacctaatatttttatgtatatgtaaaattatttaggaatttcatttttgtgtatataaaattattattttggaattctcctttatattatattattctaatagtttatctagtatctcatttaaatgcatttatgtatacttgtacatatataatttataggttaacttaattttatatgcattattaatttcatgctattttttataaaaaataattcctaaatttatatatatatgttttgtaaatctattatgagtattatatcttatcatgtatttttactattctttcatattttatatattatttaagttatcgtgtacattgtaaatttttaaatgaatttatgtttaaaatagtttgcatataactttattcaaacttttattttataatatctatttcaataattatatatatccctagtttttatgcaaatttgtcaacttgtatattatatatattatgtgttcattaattcatcattattttgaaaatgtctcataccacattgatttctaatttccattttagtttgtacatgttttgtgtatcgttttatattgtgccatatttattgttaatgtatatcatttagtcattgttttatttgttatatcacttgttctctattcatgattaagaatttggttacattttacttagaatagttgtacataattgttggatttattaattgtggtttattgtactatatgtgtgcatattatttcatattcattaatccatttctatacaaatgtttcgttgcaatgtttaagtattccatctattttaaaacaaataaatgtgttttgagctaatttccaattttccttattattcaaaaattctgaaataaggcaatatccaatatttgggaattcgggaaatcgtgccctatcgtgttggatatgatttttcggtgaactaaatatttgggtatccttttataattttagtgtacgaatatttgaaagtcaaaaatcaatcatatctttgaaggtataaaagatcatatccaatcgtgctgggtatgatgttgcatatctttgaaacgagagaattttgacagttaacttgaactattaacacattttaaagaaccatgctttgaaagatatttttttaaaatctttgatataaggatagcatcgaatcaatttgataccaatttttggacataatgagggtgctcacctttcctcatgcgtaaccgactcccgaaccattttttttaaaaaaatttacaaaattgttttaagtggaataaaacattttagcaggtgacccaatcccacttaagtaaagagattggtggcgactccacatgttatttaaaagtcgatccctattttttctaactctaaaaaaatagtttcaacaattttgtcttttttttttctttcctaaatgtaaagagtgttacgagtttgtgagatttaacatttattttttaagaccaggagttataaacaattttaatgtttaaaatccgattattgatatttttaagggttctactcttaaaaaatctattgttgaatcattatcgtttttaaaaacaagtcttccaagaatttcgcgagatgcttttatccatttaattttctgttttatccatgttttcaattctttaattttccattatacaaaactgagttctattcacttattctttttttttttcatatttgagtcactccaattggacatttaatcaattcggtaataccactcagcccctctctcccttgttttcctttgtaatttcaattcaattttcattgtcatccaatctaacatgtgacctgttttggtgttaaaaacaactaatttaggcgtataacgtatgttgagacgcattatttttctatttatgagttgaagagagttataaataattttagacattatgtcaaaaatatatatataattaatacctaaaataaatttgttcaaaaaagaatcttaaaatttcgcaaatcgaggagtggacataaagagactgttgttgagacttgagcaagcgcaaaccgatgttgaaaatgctatgtagatgctactatttttgagggggattgaaaatgatggtaagttcattagagccataaaaagaagagaaagaaaattctttagagttaattttttttctctcttttaaatgtgctaattaagattccagtgaagtgatagacttttagtcactataactcagattatatatttgataacccaatgtgactatttggaagatagataaacaacatacttttagaccaatccaaagagccaagtgatgtagaattgcatagaaatcttgcaattagtggaggaactgttaaatttactttgctctttcctttgaaaattgtcaccacaaattatcaagttatcaatgggcttgagatgatggactacctacgccgaattattggttaattttagacatgatatagtagaacgattttaagaaaacacaataaatcaaataattagtcatgattaaatttgtagtagtcactaacactttcttgtaacacacctttagtaatctgattaggaggatactaataaatttttagatcaacaggattatttttgtttaactctgtcaaagaatcaacaatcatattcgttgattgtagagcacataaaataatttacaattttaaatcaaatttctatacattcatgattaatacaaagaaattattttgattatttttaaaaaaaatttgatttgaggtttgtaaccaatttaatttgttttaagtctcattgagattttatcttgaaaattcttagagggcctttggtgtttttctattataagattctattagaatctgatttttgaaaggccgttgataagaatgtaattgaagagaaagttactttataatatttgaaatatgttagaaaatatttattaaaattcacagaaaataacatcaaaatgtcttattaactaaataattttttgagaatgtggtaataatttataaaattatccttattaattaaaagataatattcatacaatttaatatttttcattatgtttattattaataaatatttgtattaagtacatttttttcattgaaatatagtttaacatgtagtttattttaacatctttatcatcaatttttcatgcatgtaatatataaatatatatacgtaaatttttaaacacaaccaaatatatatttttgagtaaacaacacctaatgttacagcattattagtaagtttacattttggttactcaacttcaaaaagttataaaatgatcactaaactattcaaaagttttcattcaagtcattgtgttgttaattttttttaaaagtccagtttgtgagctctaaatgacgattcgacaatcggtatggtggatcggtatctgttgacgagtagaagaacatacattagatccaaatcaatttggcgcttagtgtcgaagatcgaagaaaaaagttgtttgaattttgattcacatatttgtaatgctcaaagctatttcatgaaaaaaaatgaattgtaaaggagaaagggaataagagctctcgattggtgcaggtgatgcgaacagtccagtgacttaaatgaaaagtttcaaaaaattcagagatcattttgtaacttttgaaattaaatgaccaaaatataaacttactaataatttagtaactttagatatcgtttacccatctttttctaaaaatagttccactagtgagtgcaagaacaaagtatgaattctgattaatttcatttggcttatgcacttttatttctaggaatttcgttattctacttttcagattttaaaattgaagtctaattgttaaaattattttgttaaatgtaagtttattataacgttatttttttagttatatataatttgtttttaattttaaaatcacattaataaatttaacaaaaagtaacattattaataatttgacttaactttgaaatctaaaaaataaagagactaaatctttaaaaataaaatataaagattaaatttttaatttataaaaagtatggaaatttatgaaatttgttatttatacttgaaagaaaactaaagatcccatgttgtgctgggcggcgtgaataaaagcaatggacatttatgcggctttgcgatataatcaaacgtgaccatgggaaccacgactacgacaacccgtacggttacactgtgagacgcggagaacttaagctcctattcctaataattattttaagtaatagcaccatcatttagtggcgactggcgattgctatttttcttgttttttatgctttcgtttcttctttaatattttccaaagaaaatcgtgataatatttgttatttcttgtgacttagataagtctcactagacaattgagtgtaaaataaattgtgaaaggatagttagaggagttcccacgaatcaagggaaggtcgtggtctcaatttgcatatacttaagaagctcgcagaagggagaccgtgtgacctggcaggtaacccagaatgaaacacgtgtccagcatgcctaaagtccgctcagaatgtcagtcctaagcatagtgaagtcaaggggtcaagtcatgaatagtgggttatgtcgtgaacaatgatagtatgtataaatactcgaatgtgcttattaataagatacaagataaaattactcaataaggataattaatcacgacgttagtgttttatgtaaattgtacatattttattgataaaaaattttaactcttaaagtttatacattttattaatttgatcttaatttaataaatttaacctataatatttacacattctatcaatatttacacaaaatatataaacgttcttacaataccaattaaaattatatacaattaataaaaaaattaaccgtcctgattaattatttttaattactcacggaattacctaaaaaataattttacaacctcaattcttattttttgtgcttgctctttgataaattatcaaataaaagtatacataataacattgaattcaaaagagtacataccccttttttctatttttgagtagcatttttttttattttgaggaaaaattcgttccacaaagtgttgggtataggtcccactatgtgggaaacccatattttatgccataatgttttgtcccttctttggttttgtcaaaaaaaaagccattttgggtttttaacgggtgttgggcaaaaattttagcagagagctaaagaaaaaatagagagaaagagaatagaaaaaatcagattttcaagcttggtgcagcagtgatcaactcttcgatcgaaggtccatccgtggttcgattgagctgatttttggacagcagctaggtgataaggtgttcttgactttgtacggtcggatttttcatccgagtcttgtagcgtcggaaatacccatttttcagcagctacgtttttggtgatgttctctcatttttctctcttttgctaaagattacatgttgttagccttgtcggagttgaatgcttgttgtaggcttgatattgtgatcttgtagttgaacatttgatgatagtggagctctttatcggactctaaagtcccgtggtttttacccttaatttagaggggttttccacgtaaaatatcggtgtctctatttatttttgttgtggttgcattagttgatttgtggttgattaaggttgctagagaacatatcttgtgctattgtgcttgccataatttttacaggagttataaggagagaaagaacaccggttgtgctttcgctttgtttcggttgttcggtttcttcccaacaaactggtaccagagcttggttattgtgtcagataattatggaaattaatacgagcaagatgattatgttgaatggcacaaattatcaactttggcggaataaaatgaaggacttgttgtttgtgaaggctttgcatcttccggtctttactactcaaaaacccgattcgaaaagtgatgaagaatgagaatttgagcatcaacaagtgtgtggctttattcggcaatttgttgaagaaaatgtttacaatcacattgatcaggagacacatgctcgaacattgtgggagaagcttgaaagcttgtatgcttcgaggtcgggcaataacaagttatttttgctgaagaaaatgatggcgctgaaatataaagaaggaatgtctatagctgaccatgttagtgaatttcagagtatgatgaatcagttgcttggtatgggtgtcaaatttgatgacgagattttaggactttggttgcttgctactctaccagactcttgggagacctttcgagtctcactcattaattctgccccacagggtattattactttggatttggctaagagtggtgtgttgaatgaagaggttagaagaagatctcagggttctacatcacagtccgaggtgttggttatcgagaacagggggagaaacagagacaaagatggaaagggtagagataaaagccgaagcaagtcaagatcgagatacaagaatcttgagtgtcatcattgtggtaagaaaggccatatcaagaaatattgcttcaagtggaagaaagagaacaaaagtggtggtgataaacacgaccggaatgacgatgaaaaattcgagcgtgttactactgttactcgtgaagatttgttagttatttgtgatcagaatttggtcaacctagcatgcgacgagactagttgggtgattgatactggtgcatcacttcatgtcacgtcgaggaaggaattcttcacatcttatactcctggtgattttggggtattgaagatgggtaatgatggtttggtttcggttattggtatgggagatgttagcttggtaagtaacaatggaacaaagttaactctcaaggacgtcagacatgcaccggatgtccgtttgaatttgatttctgcaggaaaacttgatgatgagggattctgtaacactttcagtgaagggcagtggaagctgactaaaggctccttggttgtggctcgaggaaagaagagctcaaatttgtacttgatgcaagctttgacttctcgagagacggtgaatgtgacactgaatgacaactcaactgagttgtggcataaacgactcagtcacatgagtgagaaggggcttagctgtttagcgaagaagaatcaactttcgggtttaaagaatgctacactgaagaattgtgctcattgtctagcaggaaagcagaaaagagtttcatttagaagccatcctcctcataggaaatcagagttgctagagttggtccattcagatgtttgtggtccgataaaagtaagatcacatggtggtgcactttactttgtgactttcattgatgattgttcaagaaagctatgggtttacactttaaagtctaaaaatcaagtctttgaggtgtttaaacagtttcaagcatcagttgaaagggaaactgggaagaagttgaagtgcattcgtactgataatggtggcgagtacacagggtcgtttcatgagtattgtctgcgacagggaatcagacatcagagaacaccaccaaagactccacagttaaatgggttagctgaaagaatgaaccgaacattgattgagagagtcagatgtttgttgtcagatgcaaagttaccaagatcgttttgggctgaagctttgaatacagtgacacatgtgataaatctgtctcctagtgttcctttgaaaggtgatgtgccagatagagtttggtttggtaaagacgtgtcatatgatcacctacgtgtgttcggttgtaaagcatttgttcatgttccaaaggatgaaagatccaagttggatgccaaggctcgacaatgcatttttattggttatggtctagatggtgagtttggttatagactctatgatccagttcagaagaaactcgtgagaagcagagatgttgtcttcattgaggatcagaccattgatgacattgataagacggagaaagtggattcacaaggtagtggtgacttgatcgatgtgaatccggttcccctagactcttcaccagatcctatccaggatgatgtgcatggtgatgttagtggtgaccatcagactataggtgactttgatactcccatagatgatgttgtgaatgatcaacaacaaacacctatagctccaccagcagttccacttcgaaggtcttctagagatcgacgatcttctgtcaggtattctcctgatgaatatgttcttttgactgacgggggagaacctgaatgttatgaagaggctatggagagtgaatgcaaagatcagtgggttgaagcgatgaaagacgaacttcaatccttgcatgagaaccatacttttgaattggtgaaactgcctaaaggcaaaagagctttgaagaatcggtgggtttacaggttgaagcaagaagagaagtcttcatctccacgatacaaagctagattggtcgtcaagggttatactcagaaaaagggggttgattttgaagaaatattttctctggttgtgaagatgtcctctatcagaactatactgagtttggtagcttgttatgacctagaggttgaacaaatggatgtgaaaactgcttttcttcatggtgacttggaagaagagctttacatggagcagccagagggttttgttgcacaagggaaagaggactatgtgtgcagattgaagaagagcttgtatggtttgaagcaagctccaaggcaatggtacaagaagtttgagtctgttatgggggagcaaggctacaagaagactacttctgatcattgtgtgtttgttaagagattctctggtgatgattttattattcttttgctctatgttgatgatatgcttattgttggtcagaatgcttctagaattgagaagttgaaacaagagttgagtaaatcctttgcaatgaaggatttggggccagcaaagcaaattcttggcataagactgacacgtgatagaaaggccaagaaattatggttatcacaagagaggtacattgagaaagtacttcaaaggtttagtatggacaaagctaaagcggtgaatactccctttgctatgcactttagattgagtgttaagcatagtccttccacagaaaaggagaaggaagagatgcagaaaattccttactcttcagccgtgggtagtttgatgtacgcaatggtttgcacgagaccagacttggcttatgccgttggtacagttagtcggtttctttctaatccaggcagagagcattggaatgcagtgaagtggattatgagatatcttcgtggcacttccaacatgaaactttgtttcggcaatgagaaacctgttcttgttgggtatacagattcagacatggccggagacattgactcgaggagatctacttcaggttacttaatcacttatgcagggggagctgtggcatggcaatcgagactgcaaaagtgtgttgcattgtccaccaccgaatcagagttcattgcagcaaccgaagcgtgtaaggagatgctttggatgaagaagtttgtgcatgagcttggttttactcaggagaagtatgtcctgtactgtgatagccagagtgctattcatcttggtaagaactcaacttttcatgctagatctaagcatattgatgtgaggtaccattggatacgagatgttcttgaagctaagctgttagagcttgagaagatacacactaatgataatggtgctgatatgttgacgaagaccttaccaagaggaaaatttgaagcatgttgtttgacctccggtatgaagggattccccacatagttggagggggagatttgttgggtataggtcccactatgtgggaaacccatattttatgccataatgttttgtcccttctttggttttgtcaaaaaaaaaagccattttgggtttttaacgggtgttgggcaaaaattttagcagagagctaaagaaaaaatagagagaaagagaatagaaaaaatcagattttcaagcttggtgcagcagtgatcaactcttcgatcgaaggtccatccgtggttcgattgagctgatttttggacagcagctaggtgataaggtgttcttgactttgtacggtcggatttttcatccgagtcttgtagcgtcggaaatacccatttttcagcagctacgtttttggtgatgttctctcatttttctctcttttgctaaagattacatgttgttagccttgtcggagttgaatgcttgttgtaggcttgatattgtgatcttgtagttgaacatttgatgatagtggagctctttatcggactctaaagtcccgtggtttttacccttaatttagaggggttttccacgtaaaatatcggtgtctctatttatttttgttgtggttgcattagttgatttgtggttgattaaggttgctagagaacatatcttgtgctattgtgcttgccataatttttacaggagttataaggagagaaagaacaccggttgtgctttcgctttgtttcggttgttcggtttcttcccaacacaaaggacgtagaaaaatccttggccggagaagataagattctttttttctttttcttaaaaggaagtccttcccaaagtaaatttattatattacataaaaattttaattaattaatttaaacaaatttataaagctttccctttaggtttagtgtaaaatataggtttataaatactaagcaaattttaaatatattcttgttattattttttttaattttaattacaaaataataaaattatatatatattcggttttcaaaaaaaaatatttgacttcaattaatttttggttacacattaatcttaagatgaatttattaaattattttatgtaaacttaattggtttttaataatttaaccgttgaatttatagatataattatagttatcatgcacgtaaagtttagaaccaatcatattgatttaaattgtgtatatattaatatttattgaacctttaaaagtcttttacataaaaataaatgattagaaaattttaatttacgtcaaatttaacatgtataatttatataaaaaaatataaaatatgatgattgaattgttaaaatattatacacaaaaatttaagaaattgtataaataaaatgctctcccaatgttaatatatataattaaattaaaatttaaaagttaacattatatttgagttttctataaatttattttaatttagttataaatatatttcgattattaatttgattatatttacaaggtgaaaaaaaacaaataatattattgatgagcatgctttgaataagaggtgacattggtagggttgtacaactttaaaatagaaaattttttatttagatttataaaattttcaattattaataataaaattatatttaattttttaaaaaataataaaaatttaatttaattttttaaaaattataaaaatataaaaatatataaactattaaaatataaaactatatttttactctaaataaactttgggaatgttgtaaattatcatctgtttttcttctcaaatcaaatcgaaaaaggagtgaataagctgccaaaataatcaattagacatctggcctacctcatctcatatttgtatgaaactgcaaatagacatctgccccacctatctatatttcaattatttatggcatgatttgatatctagccatttgttttttctttctggtacaataatttaggcatctttggatcgtaaatatattttaatattccttttttttaattataataagagggtaaaatttgaataataaatgcgattaacgctacttaaatttagaccatacttgagatagtgaatattttttattatcaggctattatatgaggttcttttctttcccttttcattataattggatagttctgtaactatgtccacaataatgacaaccacctaattattctggtattatcttgacgatcattactttattgagaaagaattgtataaaattgtgatttcatgttatctttatctctttctaataaaatttatctctttccaataaaaaaataacaaactagatttttatttataattttctattttacaaaatttaaatataactaaaaaagctaaaaatcaaaagataaaactgatttgtcattctcctattaaaagagatagaaatgatacggaatcacagtttccagtcatccattttcttactttatttttgatcattcatcacatataaagtttacatgcaattaattgattataatgaaattggattgcgatttaattcgattagtattaacattgttattggtacaagaagataaggatttgagcatgctcaaacacgttttattttttttaaatattgaaaaaaaattatgaacaattttaaacattttatcaaaaataaaacctaatgaaatatcattaataaataattttaaaaataattaaaatcaaatatttaaatttggggagagatttatttatttatatttgtgtaaagctgaggtcacaagtttaatgatattgataaaaattgattttgtatcggtgtaagtagatccctctttattataatttggttaaaatatgctctaagtctttatactatttgtatatttgaaatttgatcatcatacttttattttaacgaatttagtccctttacttttatgtttaaaaatataagttcaattgttaacaccactaaagtttttctattaaattcttgttcattaaaactctatttagtttgttacatggccacaaaggaagtattaaaaaaaaatctaaaatgttacaccaagaaaattgacaaaataattataagacgacattaacaattggatctgaattttaaaatatgtaaagtatgtggactaaattccatgaaataacagtaaagggaccaaattctaaatttatgaaaggtatagagacttagaacatattttaaccttatagtttcaacaagttgttactgcagattgttgtcaccctacttgttacatggcaacgattttagtctaaacaaaattaaactcataccataaaacgaataaaaacacatttatattaacatttttttcctctacaaaattgaattttatttaaaaagttgtgaaagaaaatcataaccaaggcttacaacacaagactacataaaaacaattacctaattagctatctagtttctttattggtaagtcactaaactaactaaactcacgataaaggtaagcatacctatcaaatagtagtatagctatgatgagtcgagaatatcatgtctacgaaaactaaaagtactagtaatcactatctttttattatctagcctataaattaaaggggaagtttttaataactttaactaaactaattattaagaacgcgacagagaatagaatgagaaaatacttgaatataaccaaagagaaagacaatatccaggaaataatctacctagacttcacttattattctgaatctgaattagactatttattcacttgtcttgatccgtagaaatccctaaattatgttaatatctctttcgagaataagaacaattaactctaggttgattaattgaaatctctttctaattaaaacccctattgtcgcattaactcgatctatggattcccctattagatttgactctaatctggtagatttttgttgccctatttctaagattacatgcaactccacccaattatgctagatctactcttaaacagagacttttgctctaatgaaataagcacatcacacttgaattaatatcttgaaaatattaaagtaagaaataagcatacataattgagaacaagaacaagtatttatcatataatccagaaaatcaaataataagatccatgataggtttcatcttccctagatatctagggaatttagttcgtactttgggaggaaaacatctcaaaattaggaaaataacacaatataaagaaacccaaaaacttctagagaaattgaatggagatcttcaatcttgaaggagatcctgcttctgagttgaattcgttggcgttcttcgagtaaattcttcgctccactctgcgtgctctcttaaatcctcttctagtgtgtatttatagactttagaatgctcaaaaaccctaaaaattggcttttttctgcgtgtttgggaaacgaggagcgatattgacacgggctggcacatggacgtgtggccagcccgtgtgagaatgcccaggtcatgtggtttctgaaaatagctcgttttgtctgattttggcccgttttctactctttttgctcccctatactctcttaagtataaaaacatgaaattaaaggattaggagcatcaaattcactaaattatataataaatcatcctaaaacgcatcaagaatgggattaaaacatgttacttttatggcttatcaattattattcaaaaacagctcaaaatctatccaaaaagaaaatcacgaatacttgaattgaaaatccaacagcaactaacatttagcattgcaacatcaagccccatcaaagatccaataccaacatgcccaccccatagcacatgcatcatcacggttaaggaagactctgcgcccacctcgtccattgaaaaatcaacaattatagaaaaaataacaaccataaatgaatatgcgagagaatgtctcttattttgacttaaactctgattaatctagagttattaaaattacatatgctacgaatttcagcctataaatagacctttgttactctaagttttacacaactaaaaattatttagactaagagaattttgttctttgtttcgaagagtttttcttgtggggctttgggtttttttattttctccatcttttgtactctcctttcctataataaaatcttcttttacctgtaattttttattctctcttaaggagtttttcacttaaaatttgtatattcaattttttcaattattattatatttactttgttcattgtttaactaggtttatcccctacagaacatcaatcaaaatcctaagttaaggacatcaatcataacataacaaagttggaaaagtccaccatcgctcaagcaccactacgaaaacagagaaacagaaaggtggcttaaccaagtgtatacttccacattataatgcaaatcaaaatataattcatcgttactaataatggagcagctgtctcatatcaatataacaaaatatctagttatgcttttcaagagccaatggcattctagtaggtggctacaatgataatagatcaactttcttcttcttcttcttcttttccacttgtcgttttcagtgtcaattgctttcctagaaaaatagatgtccacactactacgatactagctatactctcatctacgacacattttgaactccatccttttccattataagttaaatggtcaaattccatttttggtccctttactatgtgagtcttcctctatcacacgtgtttagctcaattttttttctttccttttccactataattaaatgatcaaattgcaaatttgatctgtttactatactcatgtttgaaatttattctttaaatttaatttgacataatttaattctttacttttacaatgatatgaattaatccaaatagttaaaatccttaactattccaattacaataatgatgtgaatttttcttaaaaatatatttctaatagcaaaaataaaaaatacaatctatttcatcacaataagttggaatatatatatttcattataagtgaaatggtcaatttgcagttttgatccctttattatgagggccttcctctatcacatgttcaactcacacaaaaactatttcgacatgattatttggaatgtgtatatatttttttaaaagaattgctctaaacttttaactgaaataattaaagatgtcaactattaaaagtttaataaaatttacataaataagtaaaaagaaattaaaaaatacacataactaaacaaaacatcataaatgattataaagtacaataagaattaattaaataaagcataaagctaaatttagtcctaatatttactaattttatcattttggtatttattcttttttaagtcattttgaccctctgcatttaaaatttagtcaaattgcttgttttttgacggaaatattgaccgcactgttgaaattttaatggcattgatgtggcaactcacgtgacattttacgtgtactttactgttaatatagataaattttctaaaattttttatgaactttttaaaactttgttaatcatttaaatatttactcttattatttttaatttttatgaattatacatggattgccacgctagtgattacatcaatgtcaataaaattttaataatttaattaatttttcgtaaaaaaaataatttgattaaattttaaaaatcaatagccaaaatgatgcccaaaagaataaatgtcaaaatgataaaagaataatattaagagctaaatttatcattatgccaataaataataacattttcaattaaatgaatgaaatcaaagtttctgatgtcgctgctctccactggaatgtactatgttcacctcacccatagattctaaccacatgttcaactcacacacaaactatgagagtacacgaggttcaaaatgatcttaaaagaataaaggccaaaacgataaaagagtaaaaagaaaatttagttttgatccctttattaagacggttttcctttatcacatgtgctcaactcacacacaaactaattcgacatgatataatttggaatgtgcatttttttaaaaaatttgtcctaacctttttaactgagggtgtcacttaaaaaaaaattaagggtgtcagttattttagttaactaataatattataaaagtacatgagtcaacgtatgtcaaattaaaatataaatacaaaatcttaaatttaaatatagtagtggaacagagccgtaattttatataaaacaatatgtacctaatgcaaccccttatcatttgatttaataaaaaattattttttctttaaaatgaattttaagatattaacatataaactttaataaaatttacacaaataagtaaaaagaaattaaaaaaatacaaataactgaataaaatatcataaataattataatgtgctataataatcaaataaataggcatagagttaaatttagccctaatttttattcattttattattttggccttcaacctttaaaatttagttaaattatttactttttttatagaaaaatcgatcaaactgttaacatgaattgtcaaataaatgtcacgctagtagatacatcaatgccaataaaattttaatagtttagtcaaatttttcataaaaaaaataaataaattgactaaattttaaaagctgaccaccaaaattatccccaaaaaataaggatcaaaatgataaaatgagtaaatgttaaaaattaaaattttcgaataaataataacattttctattggacgaattaaaaaagtttaggatggccatgtactacgttcatctcgcccgctgattctaacgcaaagtagtttttgtccctaatatgtccaatctataataattttgtggttaaattttgctttaggttcatgtaatcttcaattgtttaaatcattttccttttttcaaagaatttagtttttctattttttagatttaaaaaaattagttcaattgttaacattgttaaatttttttattaaatttaaattcattacaacattattttttattgctgcatgactataagtaatttttttatttcaaactatcaaaccagttaatctaacagaagaaatttaacgaggttaaacattggacaaaaattctaaaatttaaaaattataaagattaaattctaaatatacgaataatataaagatatttactatattttatggaagggccattttcataaaattaattctattggaattaaacttttcactaaacttccataagattttattttctatttttttcctttagaagaaattcaattccataacaaatagaaaaaaaatatttgtgatttcacccttggagaggaaacaaagtccaaattctcctgcttggatatttgtgcatgtaaaaacaaaaaagaatgttttagataaaccactactatgatgctaaatatcatatcttaatctttcacagattaaagtagtccagcctttgtcacctcatcaaataaaagataaaagagaaaaatgctcaattagtatgtggaaaaaattgcacaaaaggtgaagaaaagaaaattaatggcgacagctactgcggctttaagcttatccgttgctttgggttaagtagaaatattatgaaaattattgtatcaagaatcatattatatgttgtctcttgtacttaaaaaatgagtaaattaatttatatatgttacattaaagagtaaaccagtctttttgttataagttttatttacttctactgctaaaaatagattagtgtacgtcagcatgaggtgtatgcaccacatgtcattatctagttatttcattaactcgctagtttttaacaaaccaaatggatgaaaattttaatataaagtatcaatttgctctttgatctaatgtataaagactaattgtctattttggaaagaatttggttcgaaagcagttttcttgcacaacagaaaaataaaaattttgaaagccaagtcgatttgtgatatttatagcaataaactttttcctaaaataatacatgtgctttgagcgagatggattctaaatgttcttggttttcaaccgaacgaccttctccactattcttgtaccacaaactatttcgactgtaggatcaaacaatttcaaaccaaacacaaagccagaaataattttcttactttcagtaggaaagtaaatctctcttttatagaaactaacaattattattcgtagacttagaaataaatttgaactattttcgggtagaaaaacaatttctcaaagttatgtttttagtcctaccaatgtcatctatttataaggagaggaaataaaactctagttaaattagtagaacataaataatatttatttaatagaaaaaaccatcccctggttgaattagaagagaggggcggctaatagggtgtgcctcccctcatatgtattattatggggattcaggcctctcttatattgagtccagttatatgtgcttcctaaacttttaacccaacactttataatttaatccaactcaataaatgtttttctatttcccaaaataaatattatttattaaattaatttaaattaaataattttctcaacctaattttaattctgttaaaatcatgaaaaatttattgtaaaaagaatctatgagaaaatgtatcacccttagccaaatcgatcgccaaatctgggtatagagtgcacaaaggaactggattggtcccaaccacaaattctaaacttaactatttaagatagactttattaaataataaatacctcttatagtcgaaaccttttaaattaaaacaaaagtttgctatctccaatctcaattctaaggaaattatttaactataatatatttgacctcgaggtgatgcttctaaaggtaccccctttctatgtgcatgacaccttactgacgatgatcattgatctaacacaatctggcttggtcccttctagggttccttatcccatgagtcctacaaccaccggtcaaaacccttgtaagttcgaataaacccaatgagtttctttactgtattactaaaaaataaacctcatcctacagggtttaaatagaaaataactaaacacactactctatgtttcatttagatgatcccattttgtttggagtgtcagactcctgtttgccttccgcctttctttgatggaagaatgatcgttgagcgatcgtttcttggtttgcttatgaccattcaactaatcctgtgggattctaaatgatttatcatccttgtagattctcacatgtccttgcacacatcacctactgtcctcattttcctcacacttcctaccatgtatatccttcttagtttatcttggctcgtaacacaccctagctctggtggataaactgacattctattcataaggcctactagaaaaagcctacaccgcactagcaatcttaaccttatttcacctttctttatcctgccctatactcgagctataacattgtttggatgactccctagtattctaccctattcatgatactttacttttaagttgaaacatatctatctgtagagaaccattcaagcctacaacacctagcagaatgttatctgagcaccattcgtgtttatgatttctcttttatgatggtttccctacgactctatctttatggtggttatacgcgcaatagctttttttcctaaagaggattactcttgacaaacacatctgtcacttagatactttttattggtatctctctttctctctttcttatcaaagtttcattgagcaccttctagcggtccttaatggcagatccttatccgtgatcctcggacaaatctcttcttgcttgtctttacaccagacattactggcacgttatttcccctgtataaatcgcgtcgggttgtcattcatatgcccttctgaattttatgactgctattttggaagtcttttcccccttctattactttttccattctcggtggattcctcaaacctgctgtctaaatatcgcttgccaacactttcattttacctctaaatttttttttcttatttgaatgatttcccacgattatcatcttggcgatccaccccatttttattgtcccgatggactaccatacattgtcatgcctgtgccatgttcctttacattatgaatccatgtttaacatcctggtgaatcattctatgtttaatgtcccgacaaactaccctggttttaatgtctaagtagactggctcatttttaatgtcccagcagactctctatactgccatagtcaagttgtggtcttaaatagtatacctccatgtttgtcgtcccaacggacttcaactagcacctcgtaatccccatgtttattatcctgaccggctttattggtcgccatagtcgagctatggtcttaaatattgtaattcccctatttagtatcctagcggactttattggtcgtcattgctgagttatggtctgacaccctaaatcattttgaggtgttgccctaaaggatcttatcatcgtcgcggtgtcgccctatagagcctattgactgccatcacgatgtttctctatagaacctaataatcatcaatatcgattcatttcttatttaatcttgatgctcgaacaccaaagtgtccctttgcaaggcctggagcctcgcacatcacggtttgcacctagcagcatagtatgatagagtcctaatggaattttatttccctatccatccacccatacctttatttcaccattttttcctttatgctcaaacaccactatgtccccttcgtaaggcccggagcttcacatatcatggttttcagccaacaacaccatgtggcggtacatagaaatatcatttcccaaatcctaacttcttctatcctatcaataaattttccttcgtagcccacaatttataagaatacaggaaaagatatatgatcaataaaacatagattcatgattcataccagtcatgcagtatcccagaaatggaatatggaaactcacctgatgcttcttttccttctcagctttgccttttcaaatgttagagctttcattctcccgaaagctaagcattataactaaaatcataagttaaatccaactattcaacttaaaactcagtttttcaaaaatatgcagaacccctaataaacaagtcaaactaattaggagtcataacactatcacagtgtaacaacccaatttcagtgaaatcgaaatattggtttcgagaccacaaatctgagtccaaaaaatgaaattatttaaatttcataaaatgataggtattatgataagaatattgcatgaatttttatcaaatttttttatcaattatgtgtctaattgcaaaaaggactaaattgaataaaatttcaaagttgaatcctataaattataaggattaaatagttataggattgaaagtgagaaatccttatatggaaattagaccattgatgaaaaatatgtagatatttttatgagtcatccatggaaaaattgaaaaatgttaaggactaaattagaaattgaattaaataaagtatgataaatgattaaatagaattaaacccattttatatcatattatttttcataaaatacatggaaaccctaggagagagaaaggaaaattctcaagcttaatttggtaagttctatgtcccatttttagtaatttttatatttttgagatcggaaaagcttaatttctttatttgggtgattaaattgaaagaaaataaaagtttagaaaattagccatggatgaatatgctgtaaattgaaagtttatgataggaaatgaaaggttattgatagagaaatcacttttacaaggtgatttttagtgaaagcatgtgtagggactaaattgcaaagtagtgaaattcttggaaaaattctaaaatttacgaaatacatgtgttgtaaaagttatattgaaattttgaataagtttggaataaggagtaaattgcatgaatttcaatttccgagcctagggacgaaattggaattaattaaaagtttaagggaaaaatggtacttttgcctaaaatgtaaaatgggcttgattgaatgtaaaaatcatagaattgatgattaaatttatttatatagatccggaagtgttgaacaaagaaaaagatcgagggaaagaaaaagtctcggattagtaaatacgattaattgtcaaggtaagttcatataactaaattaagcatgtaaatgtattgaattgattgttgaatattgtgtattatgatttgaaattggtatgtacatgtaataaatcaatcttgatttgtgaggtgtaaatgatgaaatattacatgaatccgtttgaatattgatttccgattggacagatgattaccgtgtatatgagatcctgcatatgttgcaataaaagttgttccgaaagggataatcttttgatctcattatgaaaaggaatgtaacccgaaagggtaatacttgaaaaggatttgtggacccaaatggtacaatttgaaaatgttaggtatactttgtgtataccatatgaaaaggaaaggtatactttgtgtataccatttgaaaaggaaaagtacactatatgtgtacatttgaaaaggttatgtgcactatgtgtgtacaaattgaaaagggtatgtacacttcgtgtgtaccacttgaaaagagaatgtgcacctcgagtgaacaattagaaaaggaaaggtctatcagaaattcaaagattcaacggaaatgtattaacaaatgaaataagaagaaatgacataatgagctcatctatgcaaaataatgtttttgtactaaccaatttggttgaatggttgtgtataggtcatatttactagtttgctaaattgatggataaattgccttatgtgtgatttacttgttatatatgaatggtaagtgttatttggttatatgaacttactaagcattaatgcttactaggtttctatttttcctgttttataatgctcaaagctcgtgaaggttggaattgggttggagctatcatcacactatcaatcccttcattttggtaaaaataataaatctattttgttataatggcatgtataagcttttgaggccaaatgatgatgtaatatgtttgtttacaacctagccattgaaatggttagtaatatgtattttgaggtaatatggtatgttcatgttcaataaaatacaaatcacctttcataaaacatgatttacaaatcaatgtaaaggtaagctttaaggtatgtttaaaagttggaaatgttagattgaatgatggaatttagttaaattggttggtatatacttgtaagttttcatgcaagaaaatggttaagtttggatgagaaataaggctaggaaatggccttatttggtccacacgggcgtgtctaggccgtgtgtgacacacggacagcccatgggtgtgtgaaatgactgtgtgtcccctgcatccttaaatatgaagtcaggatagtacacgggtaaaagacatgattgtgtggcttgactgtgtgaagaacacgagtttcaagcatggtcgtgtgtcaaaatcatgtgaaaaatggcttaaaaatggtgaaaaatcagtgtaccacacagcctagccacatgggcgtgtgcccaggccgtgtgcccctttgatacttaagaaattgcaagtcagaattccccacgggctggccacacggccatgggatccccacgggctggccacacggccatgtcccaagccacacgggcgtatgcccctatcttcaatgataaatttccaaagttttcagtttagtcccgaactacttctaaagcatgtattgggtcacgtaggcccatattagggattttttaataaaatttaaaaagttttgatttgaaatacaaatttatgactcggttttatgcaaatgctaatgtataagtttgataatgcctcgtaaccctattctggtaacagatacgggttaagggtgttacatttagtggtattagagctacaatttagctgatttttgaactaacgtaacaagtgtgaatttagctatacatgccattatataattgatgatagtgtgatatctcttgaccattttaaatgtgtttttcatatagtaaatgtcttccaactgagcaagagcagaatttgaggaagctggagtgcttctcaagctttcgtacgacgaaatgtaaatggtagtagtagaagaaggtccaaatcagagggccaaagtgaatatactaaagaggctttctttgaaatgttggataaatggtttcctgaatacttgagaagaaattctgctgctttccaaccacaacctcccccaccaaatactcagaccgttcttgagagaccatcgggtactgaaactgttagaattggtaaggctctagtggataaactcagaaaatatggagctgaggaatttagagctacaatcgaagatgatctagaaaaagctgaattttggctgaaaaatactactcgagtgttagacgaattatcatatactccaactgaatgcttgcaatgttctgtatctttgttaaaggacacgtcttatcacttgtgaaaaacagtaagttcagtggttccaaaagaaaatattacttgggaattttttcaatctgaattcagaaagaaatatattagtcaaagtttcctagattagaaaaggaaagaatttttaaaattaaaacaggggaataggaccgttgcggaatatgaaatggagtttgtacggttaagccaatatgctagtgaatgggtacaaacagaggcagaaatgtgtaaacatttcgaaaaaggattaaatgaaaatataaagttactgattggtattctagaaataagagagtttgtagcacttgttgatcgtgcaaagaaagctgaagagctaagtaaaaaaaagaagaaggcaaaccgagaagcccgatcctctgggaacagacctattagtaggtctcaatcattttcttcaaagaagtcaaagaagtaccaagaaggatttactatttcatctggtactccggtaaagtgcgtggttctcaacgctctaatcccaggtcatcatcatcgtcagtgactagtgttggcagtgtgggaaacacgaagccaaaatgtaaacattgtaacaaatttaatcatagggaatgttgaatgaaaactagtgcatgttacaaatgtggttcatttgatcatttcttgaaagattgtccagaaatagtagaaagagatgttgaacagacttcaaaaccaggtaacactgcttcaagaggcagaccacctagacaccccggaaatgttagtggtagccgaagcactaaaaaagattcaaatgctaaatttgaggctcgagctcctgcaagaacatatgtcatacgagcccgagaaggcttcagcaccaaatgtcattattggtactttttctttactagatactgatattattgcattaattgatcttggttccacacattcatatatatgcacaaatttagtaaatgttaaaaatttacccactgaattcactgaatttgtggtggaagtttcaaatcctttgggtcaatgtgtaaaggtggataaagtttgtaaaagctgtccatttatggtaaagggtaaatgtttcttggttgatttaatgctactgccttttgatgaattcgatgtgatattgggaatggattggttagcccaacatgatgcagtggttaattgtaagcagaagtatattgtattgaaatgtcaagacggtgagttatttcatgttgaatctgacaagctagaaggattatttaatatgattttagcaatagcagcacaaaatgtatgaagaaaggatatgatgcttatcttgcatatgtgttggatactaaggtaaccgagtcaaatattcaatctgtaccagttgtatgtgagtttctagatgtgtttccggaagaattgccttgcttaccacctgtcagagaagtggaattctctatagatctaattctgagaacaacatcaataccgataacaccttatcgaatggtccttgccgagttaaaagagttgaaggcacagttacaagaattaattaacaggggttttgctggacctaatttctctctatggggtgcttcagtgttatttgtaaagaagaaagacggatctttgaggctgtgtattgattatcggaaactcaaaaaagtcactataaagaataaatatccattgcctcgaattgatgacttatttgatcagttgaagggagctactgtattttcaaagattgatattcattcaagtattaccagctctaggtgaaggattcagatcttccaaagacagctttcagaactagatatggtcattacgaattcttggtgatgccatttggattaacaaatgcaccagcagtgtttatggatttaatgaacaggatttttaggccgtacctagataggtttgttgtggtattcatagataatattttagtttattctaaaagtgaagatgaacatgctgaacatttgagaattgtgttgaaaactttacgggaaaaacaattgtatgccaagtttagtaaatgtgaattttggctacgagaagtcagctttcttggtcacattgtatttgctgaaggcatcaggattgacctaagcaaaatttcagcaattattaattggagtccaccaaagaacgtgtcaaaggtcagaagttttctaggcttagccggatattatcggaaatttgttaaaggattttcaatgattgcttctccgataactcgtttgttacagaaagatataaaatttgagtggaatgataaatgtcagcagagttttgatagactaaagactttgttgactgaagcacttgtattggtacaacctgaatcgagtaaggaattcgtaatttacagtgatgcatctctaaatgttttaggttgtgttttgatgcaagaaggtaaagtagttgcctatacttcaaataacttaaaccacatgaacgaaattacctaatacatgatcttgaactggcagccatagtgtttgcattgaagatatgacggtattatttatatggtgaaaaatgtcatatttacactgaccataaaagtctgaagtatttaatgacacagaaagacttgaatttgaggcaacgcaggtggctcgagttaataaaggattatgatttaattattgactatcatccgggaaagaccaatgttgtggtggatgcactaagtaggaaatatttgtttgtcttaaaagaaatgaacactcggttatcttgttcagataatggttcggtcgtagctgaattgagagcaagaccgacatttatacggcagatctatgaagcacagaagagtgacaatgagttgcaagttaaacgggagtaatgtcaaagaaattctgattcagagtttcaaattgggtctaatgattgcttgttgtttaaaaatagaatatatgttccgaagaactcagaactggtacaaaagattttgtatgaagctcataatggtacaatgtcagttcatcccaatagtaataaaatgtataatgatttgaaaaaggtgtattggtggccaggaatgaaaagagatatttctgaattcatagccaaatgtttaatatgtcaacaagtgaaagctgagcattaggtgccttcagggttattacagccaatcaatatactggagtggaaatgggaaaggattatcatggattttgtaataggattacctatgtcaccaagaaagaaagatgcaatttgggtagttgttgaccgattaacgaagacagcacatttcatagcggtatgtatggacttttcattggataaattagctgaattgtatgtctctgaaattgttggattgcatggtgtaccagtttctattatttctgatagagatcctcgatttacatctcgattttggtataaattgcaagaagcactaggggcacagttgtattttagtactacattacatcctcaaactgatggtcaattagaacgagtgatccaaattttagaagacatgttacattgttgcgtgcttgaatttgaaggaaactgagaaaggtacttgcctttgattgaatttgcttataataatagctaccaatccagtattaaaatgacactgtatgaagctttatatggtcagaaatgtaaaacaccattgtactggatagagcttagtgaaaggaagattcatggggttgatctaattcgagaaactgaggaaaaagtagaggtgatacaaaacagcttgaaagcagcttcagacagacaaaagtcttatgctgatcttaaaagaaaataaattgagtttgagattaagtgtaacacccctaactcgtatccgctgccagaacagggttttagagcattactaccatttacagatcactaaaaaaaatttaaatacttaccgattcaatgcatcatataaataaatatattaccattcaatcaacagttttgacacttgtataagcatcaaacagcagcattgttagtatacttgcacatatctcatataaattcaacattgatatatctattttctcgacatatcgcacttgagtttaataatagtctcaacttacataatttccttgtatcaacatatcaaagataatcatatatgtacatgtcatgaaacatatcatgctcttaccgttttttcataagcatatatcattcatttcattatatcaatatttcatgctctatcatttccatatattttatgtatatttattccggtaatagtttatatcaaacttaacataaattatattccatgtacttatacttattttgtttatctatctttataattatttcatataaccattcgtcatctgatacatattacctgaatatcaattgttcaacagatgtcatagcgtctcccatccacggtcttatttatctttgacatgatgccatagtgtctttcaactatggtgttactcattttctgtcatgttgccatggtatctttcaaccatggtcttattcatttcatgtcacgctgccatggtatctttcaaccatggtcttatttatttctcgtcatgttgccatggtatctttcaaccatggtcttacacgtttcatatcaggctgccatggtatctttcaaccatggtcttacacatttcatatcaggttgccatggtatctttcagccatggtcttacacatttcatatcagagagcacactcccgcgaacctcatccttatagtgggattaccagtccaggctaaatcccctgtaatataaactcatagagtattgtcgggattaccagtccaggttaaatcccctgcaacgacaattactctaatgagcttggatctgaattaccagtccaggctaaattcagaccctaattcggattacccgtccgggctaaatccattttacacatattcttcgggagggctatatcaggataggatcacccgtccgggctagatcctttttaccgtcaattccttttcagagatccatcgaattttcctttcattcaaccgggatttcttcccattttatcaaatatatcaatgtttcataaattttcatacaatgaacacacaaatcatattcacattaataacatacaatctcaagcatttaagaatataattcaagttacacgaacttacctcattgcttgtttgtgtttataatttcattagtccgatatcttttcttttccacgatcaagtcttatatttgagtcgtccggatctttataaataaatttgatcatcattttcattcatttcatattctaatgcatttaattaatgctctaggaaaattatcattttgcccctaacttttaattaatgatgatttcgtccttagggtcaggaaaataaaattcttgcaatttaatccttatttccagctattattctcatatatatattgataacagtccataaattctataaaatatcagaattttccataatttcaacacttttcaatttaatccctaaaacatgttttccccgatcttgaactaaattaataatttcattaaattttgtaatttaaataataaaataatccatttcatgcaatttggtcatttctgactttttacaaaattgcccataaagttttatttttattcaatttagtccctgagcctaaaatatgaaaattagccatgctagatgaatattcatacatatttttccttctcctcctctccattccacatccttaatgtagataacacacttgtaagtaacattatccataatttttattatttacttttatgaatattcaagctgtccatctatgtcatagtcactaaattatttatatctggagatctagaactctaaattaatatacgataattttacctgaaactagactcatatatattcttaccataaaattttcagaatttttggttcagtcaataagtacagtttattctttaaagttacccctattctgctgtcagacagttgtgacccttcttcactaaaaattaattatcttctagtacagagttcgaatgatgttcccatttatttatattgaaaatagactcattcaagattctaaaaatataaatttaagcccataattatgatgatccaattttttatcatttttcaaagttagaacaggggaacccgaaatcattctgatgttgtctcacaaaatttactatatctcatgatttaaaaatctattacttacaccgtttcttctatgagaaactagactcaatgagatttaatttcatatttttttaatcttctaattcgatttatacaatttatggtgatttttcaaagttagtctactgctgctgtccaatactgttttagtacaagatattaattaccatgttataacatccttattttctttttctacaccatttctcatcactttctcttattttctcttcactaacatatcaaggacataagacgttatctaagaaaactctactataacattatttccatgttttatcaataataacaaacttaaaaacatattaaaatcttgatatacttaccttgttctattgatactaatctttaacttgattttctctctcctccagcttctatttcttgaatccaacttgatattctaactccccatggcctccttaacatttctctctcttagtagcaatggaaattcttttgatttctaggtggaaatggtaaatttttggtggaagaaccaaattgtaaagaaaagaaaatttctttcttttccttctcttctaacgttggctgcatgcatggaaagatgatgaaaattcttcatctttccttccttttatactaaataattaataataaaataataataaaatatctcattaaaataatatatatctaattaaataatcataaaatatcatcaacatcatcattactttctagatttctctctcttccaattgaccattttgccctttattatcttataaaattccatccttgagtcatcatttaattttggtaaaattgtaatttagtccctcatagttcttcacctattcaatttggtcctaattcatccattttccttagtttctagatcattccactcttaaaatatttacactattggtcctaattcatccattttccttagtttctagatcattccactcttaaaatatttacactattggtccttcaaatttttcatatttacactttaaccccttaaattttgagtatttactcttgtgcaacaaaaattttctcacttttacaatttagtcctttcttgaattaatatatcataatatacttcttaatattgacataactcaaaatttccctttatgtcactttatttccttattttactatatcaaggataatatcttactgtaaaaattttcagggtattacattaagattggtgataaggtattcttgaaagtgtcacattggaaaaaggttcactggtttggccgtaaaggaaaattaagtccacggtttattggaccatatgaggtcattgaaagaattggaccagtagcttattggttagctttaccgccagaacttgaaagaatttacaatgcttttcatgtgtcaatgctaaaatggtatcgatcggatccatcacatgttatctctccaacagaagtggaaattcagcccgacatgacatatagtgaggaaccaattaagatcttagcacaggaaacaaaagagttgagaaataaaaagataacattggtaaaggttctttggcagaaacatggaattgaagaagctacttgggaacctgaagatatcacgaaaatgcagtacccgaatctcttcactggtaagattttcgaggacgaaaatccttaagaggggagagttgtaacagcccaatttcagtgaaattggaatagtggtttcgagaccacaaattcgagtccgaaaaatgaaattatttaaatttcataaaatgataggtattatgataggaatattgcatgaaaatttttatcgaaaaattttatcaattatgtgtctaattgcaaaaaggactaaattgaataaaatgtcaaagttgaatcctagaagttataaggattaaatagttataggattaaaagtgagaagtccttatatggcaattagaccattgatgaaaaatatgtagatatttttatgagtcatccatggaaaaattgaaaaaggttaaggactaaattcgaaattgaattaaataaagtatgagaaatgattacatagaattaaacccattttatatcatcttcttcttcataaaatacatggaaaccctaggagagagaaatgaaaattctcaatcttgatttgtaaagttctatgtcccgtttttagtgatttttatatttttgagatcggaaaagcttaatttctttatttgggtgattaaattgaaagaaaataaaagttagaaaattacccatggatgaatatgctataaattgaaagtttatgataggaaatgaaaggttattgatagagaaatcacttttacaaggtgatttttaatgaaagtatgtgtagggactaaattgcaaagtagtgaaattcttggaacaattataaaatttacgaaatacatgtactgtaaaagttatattgaaatttggaattagcttggaataaggagtaaattgcatgaatttcaatttccgagcctagggatgaaattggaattaattaaaagtttaggggcaaaatggtactttttcctaaaatgtgaaattggtttgattgaatgtaaaaatcatagaattgatgattaaatttatttatatagatccggaagtgtcgaataaagaaaaagatcgagggaaagaaaaagtctcacattaataaatacggtcaattgtcaaggtaagttcgtataactaaattaagcatgtaaatgtattgaattgattattgaatattgtgtattatgacttgaaattgatatgtacatgtaataaatcaatcttgatttgtgaggtgtaaatgatgattaccgattggacaggtgattaccgtgtatatgagatcctgcatatgttgcagtaaaggttgttccaaaagggataatcttttgatctcattatgaaaaggaatgtaacccgaaagggtaatacttgaaaaggatttgtgtacccaaatggtacaatttgaaaaagttaggtatactttgtgtataccatatgaaaagaaaatgtatactttttgtatgccacttgaaaaggaaaagtacactatatgtgtacatttgaaaatgttatatgcactatgtgtgtacaaattgaaaagggtatatacacttcgtatgtaccacttaaaaagagaatgtgcaccttgggtgtacaattagaaaaggaaaggtctatcagaaattcaaagattcaacggaaatatattaacaaatgaaataagaagaaatgacatgaggagctcatctatgcaaaataatgtttttgtactaaccaattgggttgaatgattgtatataggccatatttgctagtttgctaaattgatggataaattgccttatgtgtgatttacttgttatatatgaatggtaagtgtagtttggttatatgaacttactaagtattaatgcttactaggtttatatttttcctgttttatagtactcaaagctcgtaaaggctggaattgggtcggagctatcatcacactatcaatcccttcattttggtaaaaatgataaatctattttgttataatggcatatataagcttttgaggccaaatgatgaagtaatatgtttgtttacaacctagccattggaatggttagtaatatgtattttgaggtaatatactatgttcatgttcaataaaatacaaatcacctttcataaatcatgatttacaaatcaatgtaaaggaaagctttaaggtatgtttaaaagttggaaatgttagattgaatgatggaatttggttaaattggtcgttatatacttgtaagttttcatgcaggaaaatagttaagtttgggtgagaaatagggctaggaaatggccttatttcatccacacggtaagacacacaggcgtgtgtctaggccggtgtgacacacggacagcccacgggcgtgtgaaatgaccatgtgtcccctacattcttaaatatgaagtcaggatagtatacgggcaaaagacacggctgtgtttcttgaccgtgtgaagaacacgggtttcaaacatggtcgtgtgtcaaaatcatgtgaaaatggcttaaaaatggtgaaaatcagtgtaccacacggcctagccacatgggcatatgcccaggccatgtgcctctttgatacttaagaaattgcaagtcagaattctacacgggctggccacaatgccataggatccccacgggatgggcgtgtgcctctatcttcaaggataaatttccaaagtttccagtttagtccagaaccacttctaaagcatgtgttgggtcccataggactatattagggtctttttgatgaaatttgaaaagtttttatttgaaatgcaaatatgcaaatgctaatgtataagttcgataatgcctcgtaaccctattctggtgacggattgggttaagggtgttacacataggttataaatctgtatgcatttctaacctcaatacatgttatgtttcaaccgtagaatcgactaaattgtgactgttatatcactaaatgtaataccctataccaggtacaatcacctgacctgagttataaggtattacgattgttaaacgttactgtaataaaaatattaggcataaataatcaacaattatattaaacaacattaacataagtatggtgtgatttacaatcaaaatcgggcattaattaagcatgtaagacttttaaaccaattcggaatcaacttaggactaaattgaaacttttacaaaaatttaggtaaaaagtgcaaacaggggtcactcgatcgtgtggccaagctgtgtgacaaggttgagactgtgtagtcctaagacatggccgtgttgcctaatcgtgtgacaaactaatgccgtgtaatcttgggtcacaaggttgtgtcgccaagtcgtgtaacatgttgatattatgtgaacgaacttgcagcaaaatcaaacagacaacatggtcataccatgcaactgtgtgtgacacaaggttgtgtggcagaccgtgtcacaggccgtgtacacctaaaaacaccttctaacctaagcaatcacacctatagtcctttaagccacaagtcatgccataccagccatttaacctattcaaagtacatcaaaaacttgccaaaaatactccatataacatacaacttaagtgtttaaccaatatgtcatcattggcaccacaattcatacataaaacattaaccattcaaacataaacaaattagcatttcatatccattccaaacaacatctatacttcattttctcatgacttaaacattatcaaataaggtactccatatggcctaaaccatacatgctcattcaataagccaattatactaaagatactaaacttgcataaacatcatcaaccatcactaataaagcaaccaccataacttgtatatttaaacacatagttattcaaaatagcataaagcttaaccaaagtacttgtacacatatacaataccataatcctatttacatgtcaattataaccgggcaaaaaaaaagtagttagttacagaaaaagttgacggatagtgtgatcttcagaaatgatccaataaacagctcgaatttgacaatttacatgaagaagacaaaacgaggtaaactcacttaaagtttagtaagttcgtaaaaattaaacatcatatatctttcatttaaagcatacaatttaatttagcatatagcaacaatccttgccttatttcacattgcctaccataccaaaaaattagtgaacttcataacattggcaagatcacaagatatatgtctcacataccatttgatttttatttaagtaataaccaatcatgccatgagttccattcctgaatatttcattaattgttttgcctaaagaactttgataactaattttggatacatggggaataaatgctcatatgagctaattattggaacgttaaccaatacagaatgctgctcacacaagccgacaagaatctgcaacgaatgttagattccagccatcggtatggtatccaccactagtacatagtatctagaaataaatcactggcacaaagtgcttggaactataacaccggtacttagtacctaaaaactgtaatcatctgcacctagtgcttggaacatcctaatgacatgttatttgtatcctagttatttattaagttcacatgggtcttaacttgtacatcttaatcttttcataattataacctcataccatgatcaaattgatcacaaatattccatataatagcatgattcaatttaagcaagtacaaatgccattatttacatttcaaacgtttgtttccaccttcaatcttaccttaattaagcatgcccattatacacatatataattagaatttaaaacatcaataggcataacaaatcaatacgaacttacctaaatgtagtagctaccaacaccttgacaaggactactcaataacttttcctttcccgcgattatcaaccgattgatccgtttcttgatccatatttaataatttaactcaattaaccaattaaaataccttaaaatttctatattcatgtaattgaccctttaataaaattttatgttattacccttaacttttaccttttattcaatttagcccctaaaatcgaaactttcacatttattacaatcaaatccaatttaagatggttgaattctctatgaccctcatacagaccataattaataaattcatacaataatttaatgccaaatttattattttatcattttagtccctaaacttaaaactaaccaatttcactttataaaatagttccaactaacaaccaagattaaaaacctatcaattacctttaataatcataaaaaatcagaaatggtaaatttcaattgtatttgcaatttagttctttttagtgttagataatcaattagcttaattagcctcaaattatgcattgtcataatatagaaattagtgagtagctagctaaacctctttcttgcatgcttgtttaataggaatcattaaatcactgactctattaggttcgatccttggaatactttggtgttccattaaacactataaatattacaacttacatgttatacttgcaaatatcgcaatattattgattgttttaagcgttgattctcagccctagtgcacacatgtcgaaccgcagccaattggccaaaaatttggccgagatgcatgtttgaatttcttgatcagcatatgacatccattcaaactgtagtacaaaattataaattttgttatctacataatattaaatttcaaatcattatgtatatattatatatttgaaaaattaaaaaaactaacctcgacttctgatcattaatctaatagtagtctcgagctcctccgctagtccaacataactcgggttattgtttcgcctattcaaaaaatatgttaattcaaaaatataaaaatgaaaaaaattattatggtaactatattatcaaatgaattttaccttgttacgagtgaaaaagtataatgggcatcaactcgggaagtaaaaatagtagttgataccgtgcccatgactacagcaggagtatgtaactactgatcttaattttttatggttgtgtcgcctgtcatgtctcttggtataacgtggccaacacaattgatccccaactaagtcgacccacttctttcaagtcaacaagttatagtagccaccttaaatgcaccagagttcaagatttattgggcattagaacaccctcgattaaccttaggatgaatgctcaggtgttttgttctctttgaagggcacttgaggtattgttgagataaccgaacttatcttcacctttcaaccatttcatctctatccaactaccaaaaaccttatccaacaccttgcctaatagttgctcacaaatgatgccaccccaagcgccaatgaccactgaccccgtaacgactagcccatccatcggtaaactgagttgtaaagttgcgtcctcgagtgtaattgtacactcactgcatggaaaatgaaatgtgtgtgcctcaagtctccatctttccaccaaagtgttgatatgtgtgaaatccaatttacacccctcgagcatatgagacacaaacaagaatcctacctcttacaattgaggttcaattacacacagtgccctcgcagatagattgtgtatgtacatctccaaaattcgatcttcgacctgattttatcaacaaaaaaatataaatttaataatgttaacaacttaaaaatgaacttaattaaaatttaaaaaattacaattttttccttatcatttgtaatttcacgccaaaaatatagttgtcatcgaaacgaataagaagaattgctattataaaaatcaattgaaatgaataaattacgaattaaaaaaaaaattaaaacaacaagattttgagagaaatttaatgaaaaatttaaaactaaaatcttaagagaactgagacaattaagaccattagatttaaatgaaaatggggaaatggttgggtttatataggaaacaaactagccattgggaggatttgaaatttgactaatgggcggatttaaaaattgatcgttaggaggatttgaaatttgaccgttgggatgttactattgtctaaaagcataccttgtaagatgtgctttcctacctagttgacgaaaacacgtccagcaagatgcatttttttattgaaatgatagatttaaaatattgaaatttatcatattttatgttgaaatattattatgtgcaatttctttttaaattttcacaaaatataaaataaaaaaattctaatagtgctaaggtttattatttataaaataatatgttttagtaattttttaactaagttggaattcatgatgggtgacaataaattcggtacttaaattcaaaatttttttctaatgtggtatctctattatttttttgttcaattttatagtaatatttgacaaaagttatatattttagtgctcaatggtaataatgtcaactttttagtgcttaaattagggttttaaagttatatattttgatactcaagtaccaaataatatagaaaacttttaaataatagtatagatgtgccaaataattttaaaaaatttattttatgctaattatcaatataaatgaaacataattgaactaaaatcccaagcagatattctcgtacattcaaatattatttattgtgcagtcaacagtggactacaattttttctataaatacaaccatttgaagctgctattctcactacgctcagaagaaaatcttgtttaaaatataagaaaaaagtcatacgcaatgagcactgccggtcaggttattcgttgcaaaggtgatgataacctcttatctcttctcccttaccccaacaactacaatttttccttaattcccttgtctcctacatacatatgaccaaatataccttttgttctttgttcgggttacattgatttcttttctgacaacatttacaatatacttgaattcatgccatagcattaaatatgtaaaaatagtgtggttttgattgtagctgcggtggcatgggaggccgggaagccactatctatagaagaagtggaagtggcaccaccccaaaaacatgaagtccgtattaagattctcttcactgctttatgtcacactgatgtatactactgggagtgtaaggtattactgtacgataaaatgaatattacaacatttattttctacaagtatttgtcactgtttttctttaatttggcagggttacactcctctgtttcctcgtatacttggtcatgaagcctcagggtatgaaagttaaaaccattttatttttttatatatttttctgtatcaatataatcttacaattataattgtaggatcgtggagagtgtgggtgagggtgtgaatgatttgaaacctggggatcatgtgcttcctatcttcaccggagaatgcaaagaatgtcgccactgtctgtcagaagaaagcaataacatgtgcgaactgcttaggatcaactgcgaccgaggtgttatgcttgctgatgggaaaaccagattttccatcaacggcaagcctatctaccactttgttggaacctcgacttttagccaatatactgtcgtccatgttggccaggttgccaagatcagtccaaccgccccgcttgataaagtctgtcccattagctgtgggatatgtacaggttttggggccactgtaaatgttgccaaacccaaaaagggtcaaactgttgcagtttttggactgggtgccgttggtcttgccgtgagtttattcttgtttcacctatggtttttctctaggctatttggtaaatgtgtttgattcacttttatccatataaattaggccgctgaaggtgcaagggtttgtggggcttctcggatcatcgctgttgatgtgaaccccagaagatttgaagaaggtacctatcatagcatcatttatatcattatatgatttgtcgttgttcctcactaaaaatattaatatactgatcatatttctttgcctgccaccagctaagaggtttgggattacagaatttgtgaatccaaaagactacgacaaacctgttcaagaggtgattgtggagatgaccggcggaggagtggatcgcagtgtggagtgtacagggagcgtccaagccatgatttccgcttttgaatgcgtccatgatgtaatttagcttcttccagtaaaaaactatactacctctttgcattaattgtcacacgcatatatgcttcttcttgaattacagggttggggtgtttgtgtgctggtgggtgtgccaaagaaagacgatgcattcaaaactcatccaatgaatctactaagtgagaggacccttaagggtgctttttatggcaactataaaccacgcactgatattcctatggttgtcgacaaatatttgaacaaggtaaggtgatgtcctctatacagattacagaatatagttcatttcgatgatggttttgttgatattgctgcaggagctggggctggatatggacaagttcatcacacactctgtgccttttgccgatataaacaaggcattcgactacatgctccagggtataggtctgagatgcatgattcatttggatgcttaagagagtgttgctgctgtatatttgcccaaccaaggatcaaaactctaatgttttgtcctactatgtgttatatttatgtgcctacttaagctacctttcccggttatcaagagtgcccatatagaactctctctctctaaaaaaaaaaaagagagttctttatatggagttttatattatgtgatgagagaataaattatcttgtaaaagcttgctttgttaatgaaataaattcctattactatgattttccaactttttttttttttgaaagataaaagtagacaaaatcaattacactagatcctcaaaaggggatccccaaacaattttaaacctattcttctatcacaagccatcttaataagactatctacggttgtgttttcttcccaggggatatgttgaatcttccgctattttaccaatttcaggagtagatgaattcttttgactagagcaaaattagcgtttttagaataaccatcctaaatgacattaattacctcagggccgactgtttgaattgagactctttctaatctcctatctaaaataaacttcaacccatctgagatgccccaaagctcaacctctatcactgtgtaacttttcaagtatctgcaaaactcaatgatccacccaacattatgatcacacattaatcctccagctgcagcaaaaccttcttaattcctaattgaaccatccgtgttcaagcacacccaactactagctatagaagggctagctaaagatctttgtatcttatgaggtgatacttttgaaactgaagtacattgtcttgcccagctacgagagaccttaaggacttcgttaatacttcaggaaatactttgaaatgtaaacaagttgtggtttttccaaatactctaagcaataatcccaaaaaggcacggtcaatctacctcacccaaaaaaggagtttaatggttttaaagttttttcatcatccattcaaggagggatccgatgtcgaatctagagggcgttccttctggaatgagcttgtcctagatattcctagttgtagggcaatctctgataacaagcaacacctcctcagatccatgcccaccaaaaccacatgtgttgtcattaccaactcatcaccttgccctttctgtattcataagcacacgtagcttgagaacaagccaaatgaagaatcgaacccattacaggcctttaaacttctaaggaagttcttaaatcggctcttttgaatttaatgtacctttccgaatcttaccataagcacttttgagggagaaagagccagtcaaaatagtcctccatttaattctatctggaccaaaagatgggtgaggcggtgggacaactataatcttattgatgacatcttctgaaacccaaagtataaaaaggtccaaattccacgatctatcatttgtaatcatattgctaagaagacaatccatattaagattagaagtggaaggaatctatttatgaaagggtccataattcccatccccgatagatcataataagttttcgtgaatgaggggtcataccttagaaagggatttccattaaaaaagaactacgtcctcttgataagttctcgggcaaaccacttgtaaccccatacttcgacaggagaatctgaacctaaagggcattagaatttgaaacaatgttgaatccaacatacatcatgaaagaagtgttatggtccttcaagtgcctcagaccaagacctttgtgcgatttaggttgacacaccgagtctcaacttaccgctttaccaccattataggacccccatactatcttcctaattggtcgctcaatctcatcacacaagcctttaggaaccatcattgtctgcataaaatagcttgaaattgaaagcaaaatcgattgagccaaagtcacctaccaactaaagagagttgtctaacgtcccaaatagacagtttactatgcaccttgtcaacaacaaaatgcagagtgttattagtgaccttctcatggaattggggcatctaaggtaagaccctaagtttcgtacttcttgacatccaaagtatccgcttatacatctctttaagctaccatcaatgcttttaaaaaagaagatatttgttttccacatattaatccgatatcccgaatattcacagaacttatcaagaatgtctttgatgacccagcttgatgttcttcagcacgtccaaataagatcaaatcatctgcgaagaagagatgagttagcggtgagccagtgcgagccaaacaaataggggaccaaagcctatggcagaatggatactttggcccaaccattccatacacaaaataagcaaataaggagacagcagacatcattagcaagcacccctaacaagccaaaatttctgtgttggaactccgttccacaaaacctgtatagtggaacttgaaattgcaaacataataacattacggagaaaattaggaatacttgcagcttgaagcgaggcatcgatgaattcccaatgcacatgatcatattttttccctagatcaattttgatggccatccatcttctattttttgcgtactccttatagaatggataacctcttgtgcgatgagaaaattaaaaaaggttagttgcttgtcttttattttagaaaacagtaacatcagaacaagattacaggttttctccaagattctagtactttttcttcttgatttgttttgtgggcctgcctttattcgtttgaatattatggtagtaaagggggctttcatgtgtgttggtgtatcgtgattatttcttgtttatgttttatcggtggtgtttggtgccagtgacttgtcgtggaatgtctctatcaaagacagtagctggtaaaaggttctctttaaggttttctttgggtttatcggtaatcttgtttggtttctttctttttttttcttttcttttagtagcttttttcttttcgtgtaaggggttcccttttttttcttgtgtgctgtgcttgttttgtcatttctgtggtaaattttttaagaggcccacgatttgttctctattatcttccgtaattgttttgctctttgtttgttttcatgaaaacagggtatttcgaaaggtctttttatattttagttacttttgcatgcattggggttttacgtattaaataatagagtttttggatattagcttagatagtgctttgaaagtcttgctaactcttttttcatcattctatttttgatgttgttcttttgcgtcttttttttgttttttgttttctgttagttttgtagtgcagttccttgtttttcttttggttcttgcgattcttgtggttttcttctttttggtttacctataggttttcattgtcatatttggattctggcattggagtttccttgggttttaagtcgcctttttttcagctcccacgagctgatggaggagagtactattagtaataaggaaatgatgaatgatgatataaacgagttcttgaaaaaacaaaaatttttgaaacaagaggctaccaaggttattagtacaaatgttgaaaaaaaactatcaacgagatgaatcatgggcagtgggcaaaattatggcaaaagaaaagctgaatagggaggcaatgtatagggtttttaagacactatggctcatgaaagaagaggtaaattttgttgctttgaaggatgaggccataatcgttaagtttggttgtttggaagatagaagtagaatcctcaaccttatgccctggttgtttgaaaactgcttattctcaatgatgccttttgtaaaagacaaagacattgcttcctatgagtttaatatatcccctttctggctaaggatttacaacatacctctagaatatatgaaccgtcaaacagcgttggatgtgggaaaatccataggtgaactgatggcaattgaatagaaggatagaaatggaggatggactgaatttataagaataaaagttcaaatcaatacatcaaaacccttaagtaggattgtgaaaattgtaggaagagaaggtttttaaattatatgtgttctgaagtatgagagactaccagatttctgcatttttgtggcttaattggacacaccactaaaatttgctgaaacaaagtgcaaggtcccgagttaagtgcgttaaaattacaatatggtaggtggatgagggcaaatatagtaaccctgaaccaagaaaggggaacatggcgtaatggagttgaaatagtgttgacaaagacgttgtcgactgaggataaagagaaaattaatacagatacaagggaagacagtggacatttagttcaaaaaggaaaagaggagtgtgaagaggattcaatgtctacttcgcctgaagaaaaatgagtcataaagcaacgagggatggtttatttcgtttcaaaaataagagaaagagacagaagggcccgaatggagataatatagatgagagtccatccaaattagtgaggagaaagttaatggataaggtttcaccttttaaggcggcggctggtgatcagttccaaattagctggaactgctgtggcgttggaaaccctgcgacagttcgtgaattgaagcaactcctagttgcaaatgttccggatatagtctttttaagtgaaactaaaattaattctaatttcttttctcgaattaaaaatgtttgcaggccgaattgtttagtggttgactcgaatatgaggagtggtgggcttgctatgctctggagcgatgaggttgaggtggtcatcataagttttttgagcaatcatatagactctttagtgaaggtggataataaattcaatatttagttcatgtgtttttatggcaatgcggatcctagtgcgagagctcaatcttaggaaatcctaaaaagtattggtagaattgtcaaagaagaatggatcgttgggggagatttcaatgttatcttggatgatgcggaaaaagaagaagggagaaggaagtggagaatgcaaatggaggagtttagagaggtgcttgaggagctaatgttagtcgatatcaaacctacaaggggctggttcacctgggccaacaacagagatggtaatgcgcttgtaaaagagcggttagaccggtttgttatgtctattaatactgttgcttttttcccgtttatagatgttaatactattagacagactaaatcggatcatgatgttgttctcacggatacgatgggtaaaaagccaaaaatgaaccaaagagatcctaggctttattttcgttatgatatgtgttgggcaaaggacaagagagaaaaggagataatcaaggaaagttagagtagaaggggtgaaaatattctagagaaattggatgggatgcgtagggtgttggttccttggcagttcaacaagtacaacaatatgaatgcccaaattcgtgacttgactgagcaaatcaatagatctatcgatgggcctattactaattctaatattaacagtttaagggaagctcgtttgaagttaagcaatctctatgctaaagaagaaggctactggatgtaaagatccagaatcagctagcttaaggaaggggataggaatacgaagttcttctatgttagggccactaacaaacagaataaaaacaatattgaaagacttaaaggctatgatggccgataggtgtgcgatactaagggcatttgtaagatggccgaggattatttccaaaatttgttcaagttgaacgttgactataatgatatgctggagatgagctatatttctaagtgtgttgaccatgataccaataatatgtttgatgaaggatgttacgaatgaggaaattttagatgccttcaactagatggaccctcgcaaggctccgggcattgacggcctttccggtgttttcttttgggaaaactgggaggttgtgggtaaagatattctaaacctttgccataattttttaaatggtcaaaaagatttttcttgcattaacgaaacgataattgtcctcattcctaaaattaaaaaacctactgatatgtctaattttcggcctattagtttatgcaaagttatttacaaaattgttttaaagactttggagaataggttgaagaaggtgttgcctagttgtataagtcagaatcaaagcgcctttgtactgggaagaattgtaacaatccggtttcgaccctagtcgaaatagtggttttggtactacaaacccgagttaaaaaataatttaatattatttttcgtgcctattataagtgaattgacatgtgtgaaagtctcgtgtaaaaatttaactgtttgtgtgcttaatttgcaaaaaggacttaatcacataaaatataaaagttgcctgctgtttgttaaaagtgcctatttgacttggcttattaaatgagaggtccttatgttgttatttgaccattgaacttatgaatggacattaatggccttgttattaatgttttaaatgttataaagttaagtgcaaaatggtaaatgataaattaatatatgtttaataaaaccaaaacatgaaattggctattattcatgttccatagccggaaaatagcaaagaaaataaaagaaaaagaacacctaaggttcggccatttcattctttcattaaggtatgagtttttttttcggtttttgataatttctacgtttttgtaatcgttgcttcgagtactatctagcccatgtctcaattgttgaattttttgatgattttgagatattccattgatgaaattatgagctttttgatgttagttgatgaattatgaaagatatttttgtgttaacatatgttgtctttgaatttttggtgattttgagtaaaatgggctaaattgcaaaaattttattttgagggactaaaatatgaaataaatgaaatacgtggactaaaatgagagttatgaaaatcaggctaagcttgtgtataagcaaattgtgtgtattttgtgattttgtgaattagagactaaagtgtcgaaatgtgaaaatatgagggccagtttgcaaaattccctaaatatgtgtctatggattattttaaatgatttaaggaataaaagggttaattttttaatacatataaatcaagaaaagaggaattcagacttagaccgagggaagtcgaagattgtagagtaaatagtccgagtcgacaatttcgtgtacgaggtaagtttgtacttaaaacatgatgttaagtatgttttgatgcttgattatacatagattatacatatatgtgtttgatttggatgaatacgatgataaactaatggtaattggaactaaatgtgcgatttaaactagcttcggctatatgaggcactaaatgtgcgatactgacttagcttcagttaattgacatggcactaagtgtgcggaatcattctagctctggctaactgttgcagcactaagtgtgcagatgttaaaagcatgaataatttacggacagttttaaaatatttaaacgaaaggtgagaatgaacgtgaataagtacgggaagattcaggtatgtttgatacctatgtggtaaatgatactatgtatttgaagctcattgatttggtatgaatatatggattgtgttgatataaatgatttgagaatttgtaaataattatgtattgatgatttttggtatgagcttactaagcttttggaagcttatgttgtgtgtatttgcattgttttatagatatcgacgctactgtgagcttggggattgtcaaaaatcgtcaccacactatcgaacctcattttggtacttttgaaaatgtataattttgaagtatggcatgtataggctagtagttgtgggattatgttttgtgatgtatatacttagccatgtgatttggctagttggtgtttaaactcatagttgataatgacttatagtatgtgatgttaatatgcaattatggtatgttttagttgataagtttggtaagtttagcttgagattgaatgatgaatggaaggaaatgttttggtatgattttatcttatgttggcatgaattggtaaggtttataagtaggaaaatggttgatattgttatgatataaatgatgaatgttttggcataaaattggctgaaatggtggtacataaatgcttgtttctttgcttgtaggttgatccaatttggggtggcaaattggctattcaaatggcctatttttgtccacacgggtagagacatgggcgtgtgtctcagccgtttgcaacacacggctatgttgcactgttatgtgtcccctgggtaccctaaaattgtaagtcaggctcgaccacggccaaggtacacgggcgtgtcttatggtgatgtgggaaagtcagtagctgtgccctgttttgccgcggctgagacacacgggcgtgtctaagactgtgtaaggcacacggcctgtccacacgggcgtatgaccttttaatagttgaaaatttttctaagttctgaaacttccttatgttatcgaattagtcttgaatgtatgatttagacttatgaatgttctatgtttattgaaatgaaaggatatttgatatttgatggttttgatctaagttataagtccggtaatgcctctaacctattccggtgacggttacaggttaggggtgttacaagaatgattcacgacaacattctaattgtgaatgaattattgcactaccttcagagttctaaaaacggttaaaataaagggctcgtggttaaacttgagatgagcaagacgtacgatacagttgagtggaagttccttgaagccgttataaagaatatgagttttgttgataattggataaatttaattatgaagtgtgtttgttcggttaagtatgtggttaagtgcaatgggactttaacaaatactataactccagagaggggcctccgtcaaggggatctcctatctccttatcttttcctattttgcatagagacattttcaagaatgctcaatcgtgttcaacaagatgagattatccgaggagttcgggctagtattaatgggccaagaattaaccatttattttttgctgatgatgctctcctttttattagaaataaaaaagagaaagttgaagctttcataaaaattttaaatgattttgaaagggtgtctagtcaacaaataaactatgaaaaatctatggtttattttagcccgaagactcctacaaatcagagggaacaccttagtaatatgcttagcatgggggttattgataaataattaccttggtttacctcttcattttggaaagaaaaaatcattaccttttaacgacatacttaaccacttctattgtagaataaatagttggtccaaaagtctgttatcttatggtggtagagaagtttttattaaatctattcttcaggctttacccacttatgctttctctatttttcttactcttgaaagtgtcattgaatatatgaattcaaagatacgcaaaatgcggtgggcaagcaaaactaaggatcgtggatgggccatacttgtgtaggacaatgtgtgtgctccaaaaggtatgggaagccttgggtttaaagattttcacttattcaacttggtgcttctcggtagacaagtgtggaggctcctcacaaatatgaaaacactttgctatcgtgttctcaggtttaaatattttccgaaaggtaacattttcagtcctaaaacagtggagaaaccatcctttacctggagaagtatatccacagtggctaggagattaaaacaagattttgagtggatggtgggcgatggaaaaagggtggacattcacaatgacgactgggggttcgaaggcttgaatggggactcttttatttgctaaaaggtgcttgtgggtgagaggaaagtccatgaactctgggacccaaacagcatgcattggtacagaaatagggtgtgtgacttttatggggataatatgggggaccaaatttgtaatatcctcattttttgtcattcttcgaaagacgttctgttctggtttcacagtaattatgggatttttacgactaaatcagcatatttttggctcattctcaaaaaaatgggcatgggtccttataggttacttgggaagaaaatttggaagcttaatatcttgcccaaaattcaagttttttcttggagagtgggacatgagatcttccctaccaatgttaaaattgcttccattaggcatgcaacaaatttggagtgctagcgatgtggagccgaaaaggaaactcttattcatgccttaaaggattgccccattgctagggatattttggtgtgtagtgggcgtgatgatagactggtaagagatgatttcaaccaatgcattgattggttggaagctgctatgagaattcttgataaaaatccatggaagacttcattactctaatttggaactcttggaacagcaaaaagaagtttaccttccaaggtaaagaggagagtgcactcacgatttggaataaagctcgggctctaagtgatgactttaggatttataacctcagagaaaagtcgatgatacctatacatcctgctattcgtgggtagaagaaacctgctcggggtgttgtaaaaataaatgtggatgcggccactgttgaggagtgaatggggctaggggttattgtgagggacgaagatggttttgtgctgggtggctatggaagcattaaagaatcggcttttaacagtgactgggctgaaattatagctatagaggaaggggttttatgggcaaaaaatatgaacttaaaaaatgttcattttgagtctgataatgctaatattgtaaacaaaattaacagaaaggggcaggatattacttttattgcgcagcgcacaaatgatgtttttaggcacctgaagacttttgagattgcgatagtcacgtgggtgcctagaactagcaataggattgttgattttattagcaattttgtccttaaaaataattgtacgtgggcttttgatgtgaactaccctagagagttacataatcttgttatttaggatgctttaaatgaaagttaagcctgtttgggctggtttttgttcaaaaaaaaacttcttgtgcgatgacaacattatcagtgatatttcctcctactacaaacccagtttgttcgaaagttatgattcttggacagaccactttaaatcggtttgcgatgaccttcataactagtttgtaaaaagcagagcatagactgattggttgaaaatgagagaaacctttcagattttggacttaagagataaacacgataagtgaattattcaaattagagtaaatattttctctatcgaaaacgctcttaacccaattacaaacgaagtcacctacatattcccactggttctgataaataaagcatgatagctatcactttctaaagctttcaacggagccatatcaaaaagagtaactttaatctcctcatcaaagatcagtttatttaaaagagtaacatcttcatcgttaaggcgtgggaaagcattagggggtaatcctttcattgggcctgggtgttcactattcaatttcatatagaattaaccatttcaaacttcaaattgatcctcatccaaaatccactcactcatatcattcttcaaggcatcaactctcttttgtttcattctcctcaaagcacgcatgtgaaaaattttggtgttacaatcccctaacaccaatcagtcacatcgtgccttttgataccatgaaactttctcatgatgtagaacattttccaattcttatctcacctctatttcaacctaattaagataagtagagttcactctatcaagcgcaatctcaatattttttaactttcgagtcaaatgcttcttacgagtactaatgtaaccatacaactctgtatttcatcatttaatatgcttcgtaaagttagagtgtactgccaacatgttagcaaaaactctccaattttctttaacaaaatctgaaaaggctggatgtttgacccaacccactaagaacctaaaaggatgccctattgagaggtgatattcaggcataaaagacaagcttaatggtctgtgatcgaatttaagccgcggcaggtgcgttagcataaatgtggaaaagcaaagctccaagcattattacaaatagctatatccaatcactcaacaatccttcctctctgctatgtgaactacgaacctcgaaaacccaaattgtgcaactgagccaaatccataaaataaccaaaaagtagacacattttccctacggtctgtccttctctcttttcgctagaggaaagaatagtattaagtctccaatcaccatccatggagacccatccattggaatagtactttgtaaggccccttagagttgtctccgtttatggctatcagcgcttccatatacaaaggtgaccaaaaaggactgcctaaaagtattaccagagactttaactaaaacaaattggggatgacttttgagaacctcaacacaaatcgactctctccatccaatctaaataccacctgaaaacccaactgcctccacataatgagaacactggaaactaagcttcacaataatcaaatctactttcccaccactgactctcatttttaaaatgtcaatcaaatctggtctatgttcttggttatactcatggaacacacggagaaacttcgaattggcacaaccttgaaaattccaaggtaaagtggtaaaattcataaataaagtaaaaagaggtaggaaaaccaaccactaggacgtagcagacgttttaacaccatcatcttgggcgtcagccttatctgttgaagtttccacttgtgcactaaggaacttttccataaaatttatggcttctagaagtgggacatgtgaattgtcagcaagtataaaacgtctcccacatccatgaatcgttttatttaaggcccttccaagatgaccactccttcctttactctcatagccataccgtttagaagatattggagaaaactacattcattttcaaatgatttcatttctttattttcattttcattttggagaagacaataatcatttccaaatgtttctaatgaaaatggagaaattaaaccatttggaaattaatgtggttttctccaaaatgaagatgaaaaatgaaaaatatttggaaataaatttatatttttcaaataaaatgaagttcgaaaatggaattaaatcatttagtcatggtaaacccattgaatgtgaaaatactctcatagactcttttacgataaagtcatgattttaacgagattagggttgggctgagaagattatctaattggaaataaattgatatgtttattttgagaaatagaagaacaaatatcaggttggatcgaactataaagaattggttaaaagttcaagtacttgtaattggactcgatataggagaggcctaaaagtccctcatgttaaacggagagacaacaaccctagtattattaactagggttgtcgccctctatacttctagttagactaggagtttgtttttctaattgaaataaacttctgcaattcaataagggttttactttttctccttataaatagatagcactagtagggttatttacacaactttaagatattgttactctgctaaaaaatagtaagaatttggaataacaattctactggtttctatggaaaagagatttttttttgttttcacactaaaagttattaaaactattttaagttctgtgtttgattcgaatcattcaagcccacactcaaagcagttcatggtacgagaatagtggaaaatgtcgttcgattgaaagccaggaacaataaggattcgtttagttgaaaacacatgtgcgatttcagtaaagggtttattgctataaatatcacaaaccagctcgttttcaatttttttattttttgttgtgcaagaaaatcgatttggaaccagatttttccaacacatctgatatcaactcaccattcaatgtagaaggtttctaggcatgtgcaaagaataacatacataaatcttcctattattgatgcatatgaaatacttctcatatgttctctttctttttgttgttttaggataatcatccaaataaatatgaaaacttgatgtagaaggttgaatgccttccttcgtaccagacgttgcaaattgttttaagatcttgccaatgtatgaagcttgtgataaaattatcaatttgttcttttggttcttgtatattcaaatacctagaacattattaaactcacccaagttcttcatgtcaaactttgagttaaccatagtttaaccaatggtagtgtcgctatatcatttttaataagtagaatataacgacctttctattcttcatacgtttataaatacaatgttcatcaatattttgctcaaatctgaaggtttttatcgtttgattaaatcttaaattccataagtgagatgctagcttaaatccataaaaggatctaagcaaattgcaaattttatacttttgtcctttagcatgtaatcactaggttgcactatatggatgctcttgttaagttattcattcaagaatgcaatcttggcgtctatttgccaagtcttgtagttgagagtcgcaacaatagataaaagaatgtgcatatactttatcatcactagaagcaaggtctcatcataattgatactttctttatgcatgtatccttttgctacaaatctagctttataggtttcaacatttccttttacttttcattttctcttgtagattcacttatcacctatagatttaatctcatctaataagtctacaatttcttaagtcatattggattttatagaatctatctcagtatccataacttcttaccaaagcttagaatcaacatcctgcataacatctttgtacatgagtggaccatcatcttcttattcgataatttttgtgttataaacattgtctataacactccttacccagactaacaacagtcttgagtaagtgatcgcatttaaatatccagagacatcatccaattttctatcattcaatcagatgatcaaatattcaaatctcatatttaaaactcatttcaaaactcaagttgtgcttaaaaaaaatttgaaaacttttaaatcaatttcgggcataaaaacacaatttataggtgcaaggcctatatctctagacatggcctatcaccatagcaatttagctactgacatgcattgtctcaagactaagggtctttggaccctagagctaaattttggatactaacttgcctgtctcaaggctaacatgccatatctcgagacctgagtacaagagagcaaaatctaatttttataatataatatatgctaaatataattatcccattaaaacataaatttataatataatattttttaatgcacatattataatatttattgtcattttcattctataaatatcaattaagtttttatttaaagtattcaactgattaagttgataattaaaattgaaagatatttaacataattaattataattaatttttttataattaataattatatttaattttgaaaaataatattttatcatattgatatattatatatcaatttgtgtcattcatgacaaattttcagagagtagacaatttctagagtggtggttaaaacttgaggtaatgctaaaaatgttaggggttcgcttctttctacaagtatttgggaactcttagattcaaataacaaattgagataagtcgatatgctccaaaattattatttttcctaccaaaaactaccttgaaatgataaaaactaccttaaaaatagacttaaaaatagaaaataaacgaaaatgacactaacaagaagcttttacttaagaacaagaaacaaattagctctaaattagtgttagataacattttctttagagtaatcatttgtcatgaaagaatagtacaatgtaagaatgaaaagaaatgacctattcttacatgactaaaagcataacctagtggtgtggcacatgttgagaattccaaacctgtgctgcacatgtatgagcgaaatcctttgcttgccacacaatacacatcttcctcctaatatgttatcaatgaaggggcctacaatgcttccattgtttcacagcttcacttagacaacttgggaccatagctgaccatgaggtcaaatctggcaaaggtcctgttagggcaagatagttttgtccttggctttcaggcattctcttccagttgacctatatcagaaagaagtcaaatttaacatttccatccaagagataatgtaaaatagatatccacaccaacagttaaattcacaattgttgatctgcataagattaaaaataagcaataacttgattgtgaaaatcatatatgattcatggttagcgattctccatatcatatatgacctagtaatttatgcaatattgttcttctagcaagtaggatcttcgtcaccatgatagtttgaaacttggaactgtaaaagaaacaaaggaaatctaggtactaaagtccgagttggacacttcatgtcaacttatacgataaaaggttttcagatccttctatcataggatagaaaatagaagtttctgtctgaatataaatagcagacatgacaagagaaagtgataggaatacataaatgtctcaaactctatataatatgcgttattaacttatcaaaattcacaattataacacaaacacgatacaaatacatgaatagccaagtgtaaaagagtgtaaaagttattatttaccatgaaaaatgtagtaattcaaatacagaattggaaattccttggtatgacggctaatggagaagatgcatgatcctagtgtttatggtaactccataaatacccgacctcttgatttcatcaccactttgagctaacactaaggttttacaccattttggtgagaacttccaccatttcagcaaaaaacattcaatccattccacaactcattgtagatttgaaaccacaaatagaaatgctgcatcttgctctgtctgactgatccaaacaacatccatagctcccctagttgcaggatactcttctaattcatctagagcatccacctcaatacaatttgattggtttaaataatgaaaagttcatggaatcctcgatttttacttctcaacatcctttgttggtgcagtgtaaagcgtataaaagcaatgatagtttctctctaaactagacacttggaaaatatgaaatctttctagaaaataagttcttattgcaactccatgcccttttgatgaaattgaattatgacaattttgcctcagcgacttgagctattctttctgacagtcttcgtattgtcaaatgcttctagagctggattagactccaagacattctgcttcacagactgttccaatgcattgttaactctccctcccaaagaggctagatatttaccaactccattttcaccacttaccaaaattgctaggctaattcccttattgatcatctgtctataggcaggatccacaactgcaaaagggtgtgggctcaactcacccaaagttacgcctttgcacttttgcttctcctgtttgtcaattgtcagataaatgtctgtctttgaaaaggatttatagcaaccaatatacttcttgtgtaggtatatagttcaagtgaaacccaggttcacccaaatatgctagctttttgtcatatcatcaacaccacatgaggaaaattcaaggtatttgaatagacactagatgtcttggccacaacctggaatatgaatggtgaccaaatggaatgtatagcacaaagtggttttaaaaggggataaaacatccaagactgatgaagagccattagatgcgggataggacttgctgttaagctattttatatgttcaaaccaccttttaagtgctttcacaaagaatgtgacagactgaaacagaccaaataaatattgtcccatatagcttcaagcaaatatttattgttcagacactaggaaaaacagtcgtgcaaaagtattaacaaaatgtcctcatttgtacctctcatgaatttcatccactagcaattaactttctccaggaacgaactcaattggaaaaacagctttcagaaactcagctttcatgttgattgcaagcaattgttctccaacaggctgccttaccttcacaatgttacttgccttcaagtttttatgctttttattgagctcaacgttgaattttcttagtaaatttagtttcaattgtttgaacaaaattgattctgtttactccaaattatcacttgtgtttcccttgagatatcaaaagatttcaggtttgcctacaatctacaccttcttctgaggttgtgactgtaattcaatgaacaaccaaagacattccctcaaccagatatacataaattttcactttcttcagaatagtcatcatacataggatactcttgctctttcacatgcattgtgttacccgtgtttaattcaagggcatgcacataaattgcacgagacaattcttcaatcgcacatagcaaccaagaaggtttgagtaataatcttatatcagcaacactttgctagtatgtgtaatgtatacaagataagatctttgacttcaatgtgattcaatttcccttcagtctatattcaactttttgtttcttggttcaatttgtagtttctttcttggtttccctttcactcccaagctcacgtgctaatacaaacattcaagaattacttatcaagtgtgttaaataataaaaaagaaacaaaaaaaaaaaagcataagccagataatctaggtggctctatattttcatccgttttaaactattcaaccgtttgctaagatattaccggaaaatagcatcgtcacccattcttacctaaaaagcattattaataatcacaaaaatgttatgtccttaagaaagaaaaacagagaaataaacaacatacttgtccaggaaatgcttcagctaatgccttgatggtagtattttgcatccaaatgtcatcaatggatggatgctgtacttttccatccaaagatgattcacttacaccaccacaattcaccataaggcgaccaccaggcatcaatctatcacttaattccaaccatatttcaacctgacaaaggcaattataaaacatgttgcaacctgtcaaatatggacatggaacatgtaaatggtaactaaaaacaagctggcactaggtacaagttagagagtgcattaaaattgtatgacagtaaagaaattgagagaaaaaggctaaaaaaatgttctgtatttgtatttcttgattttctacataagctacatagacatttattgtacatataggaagaaaacatctaacaagaataattgcgaattcagcctaattactatattttcattaacctttttccttaaaatcagaaatagaatttcctaatttattcctgattttatgggatttgggattcccttgctatctataataacaaaaaaaccctcaagctggattgtagatgttgaaaaagccaagcatggaaataagaatcttgaatttgtttattggaagaacctttgttgagatatcgccaacttgagttgatggaggaacttagagtactttgacactcccttcttctattttctcctgtattaaataatgatcaatctctactagcttggtctagtcatcatgtacaggattcttagcaatattgatggatgattgattgtcacaaagcgtctctatagaactgttgatttcaacctttaattcctttggtaccctttcaagttgtattctttcacatattccaagtgctatcgacctaaattttgcctcagcactacttctggagactacacatggtttcttgcttttccaggtgataagttccccccccacagatgtacaatatccaaaagttgagtgtcgatcttttactaagcctacccagtgcacattagtgaaaacttcaaactcttggccggtatttctcatgaaatagagatcctttctagtacatatcaatttgttaccaaaacttagtaagagtactgaagtattctatcactggcatttcctccttcactcaagttgtgaaggaggcttccaacttcaaacaagaccaaattattttcattattggaatacatttctttaactgcatcccaaatgccttcagcagtttcttaaagaacaaaattttcaccaatttcattgttcatagaattaatgacattaccatagcagcttcagtaataagatcatcttttcctttgtcgtaaataaaaatcattactgattggctctactgcaaataattgttccagtttaatttgtggctggtgacaagtagtaagttcccttcaaatcctccattggtgtttgtattagcaggatcttggttggatgtgacttcagaataagcgggcaaagttctctggttgccatgggaacttaatagataagaagaatttaagaatttacaaaagaaaaacaaaagggatttggtttcagaaacagctctgacgccatgaagaaatggagagaaaaaggccaagagaatgcatatatttgtgtttttttttttcctgacttttctgcatagggctattgttaaacaaccttatttatagcacataaagcaagggaaaatctggaaacaaagaatctctaattacgaaattctcctttatcatatcccttaaaatcataaacacaatatcctatttaattcttgatttgatgagagatgatattatgggatttagaaatcccctaatatccataataacaacaataacttaatattgctttgagttagtttgctagctttcaacttgataagtccttgttcgactaggattagaacatggcaatgcatttgagggtagtcattgtataggaaatgaaactagtccaattgacaaaacgatgaaccttagatgtcaaatgaatgatccaagctaagtttagtgattcattcaccttttctattcaattttagtactcttcactaggaattcgacaaaggataatctcataaaacacaaaattatatttttatttaaaacctaaattacatccacactcataaaaagttgaaccaaatgcaaaattttcccaaataatgctcacagtactaaaactatagctctttatcccttattttctgcactcaacctcagccctataataactctatagccccaccaaatctcccttaactaaatccaaaaataatctctacaatcacctacatatgtttcatcattggcacattgtacatacctcttgcaactgtgaaagaacctttccatcagagaacaagtcaataatgatgcctgaacaataattgttcatacaagttagtctgtgaaacacaatcatctactcaagagaaactcagtgcatgtctgtgagtgtttgtgatctcaaaatgtcaaatacacatgttaatgcatataattaaaattgaaatctcaccagcatagcctgaaggacgatgttgttcatgtgaaaaagcatcatcaatgtgaacttgaagctgaccaccaacgtcattacacttctcaagattggatagcccaaaatattctcttgctttatcaattaactgttgtaaaaaaatacaaaaaaggaaataatagccatccaccaagaaaggaatcaattgagactggaatcttcattgatttaaatatttaaacccggaaaatatagctaataaatttagcagcaaagtcttcaccagaacaaatgccacattatttaattgctttaaatggcatagaaggaaagggatagaccatgactaaaataaacagatccttgtttaaatgaatcaaaataaagatgaaaaattcagctacttgtaatatttctattgtgcctatctagtgttttaaactatgttgttctaactcttcctttttcataaagcatccatggaggttcaaacccacaaatatatgaaagacatagaaaaatataagtgtacccgtattagacacatacccaaatccaacactaaaatctaaatccgagaaatagaagttttataaaattcatcaaataggagactaagacttaccggtggctatcaacaatataaatcatatttgtaactgtgaataggaaaagggaaatcatgaatcaaaacattgtatggccaaaacaattaatgtgataattggagaatgtatattatgcacttgtcaacataagttaattcttactatttcatcaatctcccaaccttcaagctgcaatgaaggccacacgtcaagcatcaaatgtgcagctgttccgccgccctacagtatgatatatagcttcacaaacaaattcactgaatttcaatttaacaagaaaaagaaattgcaggtcagatgagatgaaatgtgttaccaatccgtagattgcaatgggaccttcaggtacaattggtggcaaactaacgaattcgtcctaattttgaaaaggggagaaagaagggaaaaaaaagttaaaacagggttcagaaaaatcaatttgaacaagtttgtcaattacaatcacaaaatcaatggtttataaggttcaagaacaaaacaaaacatgtttaaattgattacaacaaaacaaaacatgtttaaattgattacatgatgaaagaacaaaagaagaggcttcttcacagcatacccaatatgatccggtccatttctcatcacccttttgtagaacgctatggacattatctgcatagggatttggggatgaatcaatccactgtctaacaacaaatgttaaaaaagaaaagaaaaagaaaaagcgtacgagtggaatcgagtagtagcatcctagattgaggagtgtcgaaaatgagaatgtcattgtattgcgtatggatggctgtcagcacttgaaaggtttcttcttctgctgctgctgctgcttgtggcgtttcgtcttgttttggataaggatttggtggtgtttcttcatgttgacttgttaagtctgttttcgtacaacaagtggatgaagagcgtaatttgaagttagcaggagtgagagtaggagtaggagaaagcggagggaagaataattcagtgagagggaaagggggcgatgctattgctgttggtgacaatgaaattgatggccaaaacatcgttgtgtgtgtgtgtgtgttcgagtttacctgatatgatatgataaaatattcagatgagagcgagcggggaaatatgccaattggcctaatatttctacagtccttatatgcatttacttgtcggataaaggggaaatcagtcagacaaatttataaaagtataactgttactcaattttagagtaggtaataaaataatcatcatttcacttatttaacttttaaaaaataataaaataattaataatattataaaaaaagtgacaaaacagctattaattaatgtcgaaaagaaaaaattgaaaaagaaaaaaaaaactcttacccactgttggtgtattttacacctttacaaaaagtgaattaaaatccaacagtaaataacatgtttcgacacttttcgattttcatatctttcagaaaaatcacaaggctatcgatattctccatcttgggttccctaatgaatcatcattttgttgcttcaacagtatcaaatgggaagcatgattgacgtttgcggaataagaaggtagaaagatgctaaaacaggtctttgttaggggggtcaagaggagatttcatttaccaaaaccatttgaaacatggcggaatgccccaaaagagaaagcagagtgcgtcgtgatcggagccggaatcgtgggactggcagtggccagagagctttcgttgaaggggaaagaggttttggtcctggactctgctcccaccttcggaacagccgccagcagccgcaacagcgaggtcatccatgccggcatctactatccttccaattctctcaaggctcgtttttgtgtgagaggaagaaaattactctatcactactgctctcagcgtgggatacctcataaccagatcggtaaactcatagttgccacaggtacttccgagattccaaagttaaatcaactgttcaatcgtgggattcaaaatggggttgaaaatcttcggatgttggacgcttctgaggctatcaaaatggagcctgaattgcactgtgtcaaagctttgctatcccctgcttctggcattctggattcccattctctgatgctgtctttagtggtatgcctcttttattctcaattaatttggtgatagacttacttaattaagtgactaaccattaccacgatccagggggaggctgaaactaatggcgctaccttctcttacaacactgctgtcattggaggtcatcttgaaggaaatcaaatggtcctccacgtttgtgaaaccaaaacacttacaaactgggatggaaacactccattgcaaccggacctcctacttatgcctataattgtagtcaattcttcaggcttgagtgctctcactctggctaagagattccatggtctaaacacagctatcatccctcctgcatattatgctcgtggctcctactttatcctttcaaatgcaaattctactagacatcctcctttcaagcacttgatatatcctgtaccagaggaaggtggtcttggagtgcatgttactctggacttagatggtcagctcaagtttggcccagatgttgagtggattcctcatgtacctgataaaaccaacttccttaataagtattcttttctcttcccattccaaatttttttatgctgctttgggtgtaatactttttttccattcccaatttcgtgattatgaattttctatagttttatttgtttacaacctatacaagttccataatttgtagatttgtatttcttaaaataacaagactacagtcccatgtagagcagtagaggaataagtgatttacttcctttaaatggttatgattataacaggtgtgattacttaagttttgagagtaatagtagaaggcgccatttcccttgagggtatattcattaaaacacaaaatacatgctagtgagtaatttggattaaaatcacagtaggttttgctgttcttctttttttgtctttctcttgtttgctggcaatggaaaacatgtcatgcataacaattatcccagcatcaatagttcagtatgtatcatttgtttatactgatgttgtgccttaaattcttcctattctactgtacactttgtttccatctctatgctaggtgcttcttccttttgtgatttcatgtcctcattgctcatcatttttatttttatttattgtaatttgatgaagagttgttatagttattactttatcgtttcttccagagccagcttcctttcaataactttcattgttttgtttgtgtgttaacttagattgtcagtcctgcttttttctgttacagtggccaatgtcctaaactaatacagtggttggcagaaatctcttgatgcctaacttggaagaatatttatctcatattaggattctttccatttcatttatgttttggaagtttgtctactgtcatgatcacatttgagaaactctttttgagtaagaaaattcccttgtgcagtagaaattgcaattgcatctaattaaatttcaatataacttatactatattctcatttgctagaactttttggaccaagtaatttgattgtgctatgcttctctttgctttgtttgagcaaacacactccattttgtatccaatagtcctggaggtggaaatctgactcttagaataagtttgttctagaactcggtagcagatagtgcagtaagttttgttcaaagtcttagttgtaatcttattcgttaaggaagtctgtacttcatttgatatttcctttgttgaagttagaagagctatattgggtgttggcatcagaggtggtctccaagaattttattgatttagtagcttggctggttaatgaaccctctttcagaggttaaaattaaaatttcagcacatttccattttatttcaatagaggggatgagttttcttttttttttttgggggggggggggtggtaccggtttgagccattccatcactagctgttttatggctctgcaaatgcactggatttgaaataagaaagagaacaaattttgctcttgagttcattcagataagttagttgctgcatttgttgcataaaagcaactgattaagttcttttgtatcgtgaaaatcattgtcatttggtcaaaaactaagcttagtggttccatgctctcaggtttgactattctgtaagtgttgatcgtgttgcaagattttatccagagattcggaagtactacccaaatctcaaagatggatctctaataccaggttatgcagggattcgaccaaaacttcatggacctggacagtctgcctgtgattttgtaatacaggtttgtttcatgtattctctttaatatggagtaataaaactgatatatacctttgtcaagccatatgcctgaatttcatttatggtacaaagagctactctttttcttattattattaagaaatactgccttgctgaattttctctaagaaaggaataacaaaaaagaagtgtccacaatttatgattggtaagaaacgtagcgagcaacaaactacaacctagcccttctcactacttggataagctaaatggacaagctttagccaatgtactgaatcttgaaccactgagtaagagcattaagtttgtagtcctatttaatagttttacttctattccttaaacatactcatcataaatagggtctaacatatcctcttgctattcttagttaagttcaccctttgttcacgattagagtaagaactatggccatttttcccgcaagtaaaacaactaatctgagttgctgccatcttaagaagcattctgtacagctgactccagccttattttcaaaccccatgtccaactaaagccttcctcttttcactcctctcaatattgcccttgtttcctccatcaacatgtttcttaaaggaagctcactgttaattttaaaggttgttagtttagttttaatgccttaaattgcttcaagccccctttttgctactccttcaatccttcccgatataggctttcttgcaccatactgtcaaatacatttttcagccattaaagcatgttttcatgtattttcaaggtccaatccatcaacatgtttcttaaaggaagctcactgttaattttaaaggttgttagtttagttttaatgccttaaattgcttcaagccccctttttgctactccttcaatccttcccgatataggctttcttgcaccatactgtcaaatacgtttttcagccattaaagcatgttttcatgtattttcaaggtccaatccatcaacatgtttcttaaaggaagctcactgttaattttaaaggttgttagtttagttttaatgccttaaatggcttcaagccccctttttgctactccttcaatccttcccgatataggctttcttgcaccatactgtcatacgtttttcagccattaaagcatgttttcatgtattttcaaggtccaataactgaacggctcctgtctcatccctcatatattggtttaaccttgctagacaatgagatcccatttattcttgtcgcagccaattatgtttcttgacgctaatttcgtcttccttgacctctaccacatccaatgatagcttcatagcaaaccctaatataaaccctaggatctaatgggaaaatagtagtaaatcaatagaattaggtctaaataaacaagttagaaagaagttacagctttagaaaacatagggtttatagagaacctctagtttgtttctattaaatcaagaaaatgataaggatgttgttgtaaatattttaaagcttatttattctaagattacaaataaaattttaatcctaactctagatttgaatcctaaagataattaataatcgtaaccgtgcaataacagaaatagtaatagtaaatttatatatttattgcttctcatgatttaaataaacttgtgacttgtggtacatacattttatgcgaagataactgcatatgtttcataggtttatgttaaacagtaagaatttggaggaaaagtatgatgtctctaatgatttacatgggtatagatatacagatactatccattctaaacctgttaagagtttagagtggattttggtgattcggatctattgggttattttgacataaatttctattttctgtagggagaagacattcatggagtgggtggtcttgtaaatcttttcggtatcgagtcacccgggctgacttcaagcatggcgattgctgaatatgtagctgctttacttttgggaggatgatggagatattcactgtacattcaaaacaaacttggtgtcttcccatagctataggtaaaattttcatttatttatatttccattgaaaatgattatatgttgaacttgatgtctaactaacaaataaatcattttattaggataaaattttgttattagtctatgtactatgcgaaagtcgtgaatttagtccctatacttaatttgattgttttcaatccttttacttttttatttttaaaattttagtcttgactaaatgttagctactaaattcattaagttttgttattttcaaattttgatgcggcaaacatatcattgcatttgtaatgttatgttagcatgctatttctacacattactcacaagaaaactagttaatggatttaataatggtcatatgcatcaagaccaaaattttagaattcgagaaatatacctattaagaatgatccaattggagaatatggattgaatctataattttacgcatatacaggattaatagtagaatttaaccacatagatttaactgttaccgtttggttatgattaaaattttaacattcaaaaattgtaagggttaaaaataaccaattcgaaaagtgcaaagactaaaattgatcaaattaaaatatagagactaaatttataactttcatagagtatggggactaattgtagaattttacaataagaggagttaaatagattttttattaggataaaattttaccataagaggagttaatatccggtaggtgaactccaagtgatgattcaatgaccaatacgatggaacagcattcttcgacgagtagaagaacatatcttatattaaagctgatctaaccgattgatgtcaaagatcagaggagaaagctatttgaattttggttcgttaatgtaacgacctaaattttaaggtcatcggaaaattgtattttcgggttataatttccgcaaaatgaattcataaatatttattagaaatatttacgaagctagtagtgtagttaattagactttggttaagtgaattagctttaattaaagctaatttagtgaaaggactagattgaatatagggtaaaagtttaattataaactatagaaaagtcaagagattaaattagcaaataagccttatgtgacaagtgtgtggtatgtataagggcatttgtattattgtgatcggtacaaatgtatgtataaatatgtaattacttattaaataagaaataatatttataatataaaaacatataataatgatataatataataataaaagaataaaagaaataaaacataaagaaaaagaagggagaaagggacgaaacagaggaggggagaaagggacgaaacaaaggagggaaagaaagaaagaaaaagagaaagaaaaagaaaggaaaaattgggttttgatgtttgaagttcaagtggtaagtcaatttagttcattttcttgtaattttgatgtttttggaatcctagaacaaagccctacttgaattatgttgaaatttaggaagatagtgaaattttagatgtttaataagttgaataaatagatgaattatgatataaggtgatagaaattcaagttagaagtgggagaaggattgaattgtaaaaagagatataagttttattatagtagggactaaattgtctaaattgtagaattgatgttttatattgaatatgaagaactaaaacttgtttaaagtagctattaaatgaaaatatgagatttatttgaagaaaaataatggttatggtggaaggactatattgaaatttttataaaagttacatgaaaaatagaagagtgttattaaatgatatgtattgatgattttaaatgttaatttttccgtagctaacgtagcaccgaaaacgtcatcgaagaagggaaaggagaaagtgaacgaggatatcgagtaaactcgataatttcagtttgtatttttataaactatgcttaataatttaataaaagtaattgctatatttaattgttaacatgtatgataaaaaaatgatgaaaattgttactgtttctgtatcaaaatgaaatgatttgaataccctattaacagtgtcgagctagatggatatagttggcatgccatagtattggaagtgttcagggatatttcgactgtgtgtcgatgatacactatatgtgtcgactactgtgactgttccggattcgttccgaagaggtacttcgtacttgattatgactgttactgttactgttaccctacggtgtattccgttttcgggcgatgaaacactatatattatccccggtgtatgtgttggatttgtgtatccgtccaagtccgagttatgttaatagggataaatgaaagtactaacaacaaagactgactactattaattatgtgactgtgaatgttatacaagtattgaaagatattgaatgatatgaaatgtatataaagaattgtttaatttcatttaagaactataagttaaaggtaagtgatgaagctattaagattatgaaagtaaaaagtttaaattataatgtatatacatagcttattaatgttttaagtattagtttatagaaataccactgagtgtatactcagcgtacgatttattttccgtgtgcaggattaggtacaaaagaaagttaaggattcagcatccaagccaatcccagacttaaagtggtgaatacttttcttttgataaaatggcatatacctaggttgttaaggtgttattttgtacatgatagtgaatatacatgaaagttgttgaagcatggtatgaaatatgcatattttagaagttaaacttacatgattttgattagtatgttaatgtagtataattttgatatgaattgtggtacatagtccttaagaggtattgaagtgaatgaatgaatatttgctaagtttaaatggcataataaatgatatttgaattaagaactattagtaaatgcttgagcatgaactggatgtgtttagcttgtgaaaatagcttaaaaatggtcaaaaatcatgttttcacacggccaagtcacatgggcgtgtgctcaagccgtgtggctctctgtttatgttacacgtgttgttcccacggccgtgtgtgcaagtcagatctgcccacggcttggccccacggccatgggagccccacggactggccacacggccatgtcccaggccacacaggcgtgtgcccctatctttaaggaaaaatttctaaagttgcaggtttaatcctgaattatttctaaatcatgtattgggcctcgtagacccatattaaggactttatggtgaaatttgaaaggttttgatttggaacgaaaatgtatgactcagttttgtataaattctagtgtataagttcggtaataccttgtaaccctatttcggtgacgatttagggttagggggtgttacagttaattcatgatgttcaaagttattttatagaaaaaaactaaatcttagaagaggaggggaatgagagatttcgattggtgctagtgatactaatagaggatatacaacgatgattttaacaatccaaatacttaaataaaaaaatttaaatagttcattggtcattttgtaactttttgaagttcagtgattaaaacgtaaacttattaatagtttagtgacattagttgtagtttacccttaatattaaggtaaagtaaactacctcattattttaaaaaaaattgaggtgacccgatcactattcaaagtgactaacgaggtagtttaccattaatattaaacataattacttatttggccctctaacttaaaaaaaaagtcattttagccttttttttatttttttcttcttttagtccacaaacttgtattttagtcaaatcaccctcaaaatgaatgaaaaaattaatgtttgttgatgtctcgtaagcaattgattatatttataaaatttataaaattattttttaaaaattttaaataaaaatatttttaaataatattttattttttaaaatataattaattgttaatatgatatacatatgaattgccacattagtaaagttaacaaacatattttttttcatccattttaaggtgattgataaacaatgcaagtttaaggattaaaagaaataaaaaattaaatagagagttaaaataatttttttattataaaattagagaacaaataaattattataccttaatattattgttaaaaattttaagggtttaaagtatttaacattaatgttatgggaaattgaaatgagtggtatatatatttaaattaaaaactttttgatagttaatcattctaatagggcggtttttatttggtcactcaaaagtttgtgttagtttgatcattcaaaaaattaattaaataaatcacttcaccagtaaacggtattaaataaatcacttcaccagtaaattgtaacgaaagattaataaaatatttgtattgaaaaattttggggtaaccaaaatacaaatgaacctatttaaagtgcctaataggtagtttaccttaattttagagtggcttacgtggaaatgtaccgttagatttccattaccatttaacagtggagtaatcaatttgatcaatccttttctggggtgtttaaattaagacgagatggtttacccacattttaaacataaaagtaataaaatcctttttttaattaaaataactttattttctttagattatctaaccataaattcataaaatataacctttgatattgtaatcataaaacataataaccattaccttaacttgtgtaaataaaaagttgtaaaattgaagttgccaatttggtgtcacagggctgccctaaataacttacaaatctaccaatagaattgtgattgctccactactaatatcaccactaagaagcttccttattatattgcactaatcaccatttctttttctgtttaatctaatcacccatttatatatgtgaagtgtaaacgcctattaattggtatctgtggatcaatctagttaacgataacaataatcaaatccattcaaaacttggcagaataatattactaaaattttacttagatatcactttataaagaaaaataagagatttttcagaaaaacataatctaataattattaaaaaaatagattattatatttgaaaaattacctaataattagatttgagtttaattatttgtacatgtatgacatgtttgggtaatcagtttaccattgaattaatgtagtttgatggtttcaattgcacaatccgattcttaaaggataaaaattgtgataattacgcggttaattataaacaattactcttaaatttaattactttgaggatttccaactgaactagtatatgatttaaaaagttgttttatatatatatatattttttatgtccgttttacggtccatattcagaagtcatggctatctctcccgacaatattgtgtcttcaatgtttaaacttgggtcttccctttaggaatgtaatgtgttttaccattatacccaatcacttattgattttaagattatttttatacaataataatattgttttaattttatatatattttattttttaaaaatatgattatatgttattttactaattttatttaaataatttgaaatttttgttgatgagtgataattcacatatattttaacttagtaaattaaaatattcaactaaattgtttagtatttgatataaatcaccgactttacttaattacattatatttattattaactatttatactcggtaaagaccaactaatgatgataataaatatatgttacattctacactcaatctaaaaatcgatcagatgtgaagtattatatcaattatcgagttaactcaagtatttttctgaaaaatgaattcacctatctaaaatcttgaacagatagataatcaaaggttaatggaaggagtcgagagaaaattaagagaatttttgtattgaaaataaaagaaatcgtgaaaatggtggagtaaccaatccctcctttgccattttgcctagatgagcttgggatatttaccaattaaggatctctcctcctaaaaatcttattttctagttcttcccacattaaccgcgctgatttggctaatcttataatttagcccataagaaaaacaaaactgcaaaaaatattaaattacactatatgtaaatgttgaaggttagattttttaaaatcaatactaaattgacacaatgtataaatactgagggttaaagttgctatcaagccaatttttaaagttgtcaccattagttagctgatagaggtgctcataggttaggttaggcctaaacatgatattaacatactttatgcttacccaatcttggttcgaccaaaaatatgggtttaaaattgtctaaattcatccatatttgcaaaagaccaacccaaacttattttaagtctgcccatattatttttaaattttaaaaatatatgtttatattatattattttaatatttaataattttatacattttttatttattgaaaatttttatataatcattttaatattattttaatatttacattagagtagtattatatatttagtataggcttatctttttaatgtgttctaaatttcataatatataaaaataacataatataaaatattataaactcaaaaatgggccaagctcgggttttgaaagtttaagttcgagcttgacccatattttaaataggcctaattttttgaataagcctattttttgagcttaatctttttactcaaatcctctcaaatttcaagtggaccttcaaaattgagcaattaacctgacctatgaataagtttattagctggtgaacaaaaaagaaaagaattaaataatcgaatatatattttgtatctttctacaattaaataatcaataaaaaatttattaataatttagtgattgttaatataatttaactttttaataataatgatgttatagcaacctcaataggaattaaaataatatttatgtattgtgtaaagtggtggagaactctctggaagtgatcgaaagtgacggtgattcacggttgatatggaaagtgatcgaaagatcgcaataccaagaacgtaagattcaaagatggatctgatggggtcactgttgatatggctgtggactctgctccatcttcgagcatgataatgtcttggaaggacaaactattagggtctggttctattggggctaaccagggaattgctggttttgatgagggaagtgatggagatttcattctgctagaagataatgttatcagatccaccattaatggaatcccgagaattgaattttctgatcgcgtcaaacaaatattatataaggagatggagttgacagtggttctgaaactactaggccgaaatatcagctacggtgttctgtttaatcaagttagtaacctttggaagcctatacaaccttttcagttaatgattatgaaaaggttctaacccagggaccatggataatttttgggtaatatttgacagttcaaccatggacaaaagacttttccactcttcaaccttacccaagtgtggtcatggcttggattaggctatctggactacctggatttatgtataagaagaagattcttgaggtgattggtaacacaatagataaggttgcaaagttttatttcaagactgataatagaactagagggagatttgccaggatggttgtgttcattaacctggacaaacctcttgtctctcaaattcgagttaatggcaatattcaaagggtggagtacgaaggcttaccaacagtttgttttgcttgtggcaaatacggacatgtaagggagatgtgctcactgtcgaaagaagcatctggtaatgagggagaaaaactatggccgactgtgagtttagcaaaaacaacgataaacgtgggaaggaaaccgaaccggcattcggaccttggatgctggtggagcgtagatcccaacagaaattgagagatttgcgagaatctggtagcaaggtagctggaaaaggaagattgggctctagatttgatgcccttattaatgaggaagagacgagcggcggtgaaaaaagaatgatgaaggaagataatgggggtttgattactcagtcggtagaaattgaaatgaatatccctgattctaaggataaaggaaattttaaaatcatgtctaattcacataatgggcctgtgaaaggtttggggatagattctaaagcccaaaaaaggaccggtaatgttgttactgtgcgcatggggacaggagcccaatcgggccaagaaatgaatagtttaaggctgaaaagcctgggaaaaggagtaaaaatgatactgggtttaatggatctatggttgggtcgcactctaagacaagcccaattagtcttggtcagcatgtctgtttaacagatgatggtcagtctgcttcttgtgcttctttaaatttgggggccacagataaccacgaaaatgggaatgtagggaagcaaaattctacgttgattctatacaggcttataaatgaccaacagcaatttcatgcgatgtcgaataccgataattctcatgtcccttttaattttgatttaaatttttctaattttgaaattggaaatgctttgccgaatgtaggtaattttgtaaatggtgttgactcaaatttgcaagctaaaaatttggatgaaatcaaagtacatttcaacccggcctttgaaggtccagttgaggttgcagttcagttgaccgataatatcttagatcagggaagcattctgttgttatttttaaaaaaatttctaattctcctaatcagtctaaaggtcgtattattgagtctatgagcgcaggtagtgcaggaactcaggtctaaaaatttaatgggaagtttggcgttgctagaggagaacgcaagaataataatgttctaaggggacgagggagtcgctttaaagcttccgccaatgtggggtctctttagctgattctatggaagaggtgacgaagcttatttcctctgatgtatcgaaggaagctggaacctgagctctagtttaatctggccctagtggtttgaatgattcttgatagtagtggtatgtttcttttcatataatattgttatttatgaatctctcgattttttcttggaactgtcagggttgcaccaatgctagatttcctcgtatttttcatgagtataatatggaacacagaccagatatcattagcctgttgaaaattagagttagtgggtccaaagctgataaaattatcgcaaagttgggttttcaattttcacatcgtgtggaggcttttggttatactgagggcatttggattggttggaaaaattctgttcgagtggaagttatacataatcaccctcaatttatctttacgcgggtttggcctaattcttcttcaaacctgatttggattgcctttatgtatggaagcctaaatcgtcaaaagcgaaaagttctttggtaggatctaagagcttctattcctagtggtcaaattccttggatggcgattggagactttaatgctattctctcccctaatgagaaaacaagtggtctctcggatggaaggagatgtccttactttggtgattttgtggaattggctaatcttcatgatttggggtttagagaacctccttttacttgacacaggggtaatttgtttgaaagattggatcgagctttgggaaatgaggcttgggttaattattttccaaatagtcttattactcatcttccgaggattaagtccgatcacagacctcttttcttaaatctaaactaggctattgctttgcctaggggaagaccattccgatttttaacaggataggccgagcaccctgattttgataatttcgtgaaagatcaatgggatttttaagggaacatgttggcttctttagataagatcactggtaatcttaaagattggaataagaacacctacggtcatattactacccgtaagagaaacctaatccataagttgtcgatcatacaaaaggaaatggatctattaggtactaatcatttggctcccgttgaaatagagataagacacgaattagaaaatgggttacatcatgaggaacttctctagaagcaaaatgctagatgtgattggttgcatttaggagataggaatactaagttttttcatgctcgcactatgcaacggcggaaaaataaccgtatttctgctattcgtaactctctgggtgattggttgtttgatcttgaagccattgagttggaagcatccaaattttccaaaaattgtatggggaagatcctgggcccatgatatgtttgcctgttaatgggttccctcaacttaattctactgatattgattttttaggaagagtggtcactgacgatgagattaaaaaagttatgtttaatatggctcccttgaaagctcttggtagtgatgcctttcatgctcttttcttccagaagcagtgggatacaataggtcctgatgtttgtgattgggtgaaaatggtctttagtggagacgatattgaccttaggcttaataataccttgattgttcttattcccaatgttatgaatcccgaggagtttgctcaatttcgccccataagcctttgctctgttctttacaagttggtgatgaaggtaatagctaactggtttaagattatttttccaaaaattattgcacaagaacaagcaggctttattgcgcggcgtaatattactgataatattattattgcgcaagaggttatccattctatgaaaagctacaagagtaggaagtggatggcgattaaaatagatttggaaaaagcctaagatcgggtgtgttgggattttattgatacgtctcttcaagcggcaggtatccctaattatatcagaaaagttattgtttctgctatttctaactctaccatgcatgttttgtggaatggagttccgacggctaaatttagacctgttacagaaattaggcaaggttgtcccttatccctctacctttctgtacttcgtatggaatggttaagttttttattagatcagctttgtccaaaagggtttggaaacctatatgtttatctcgttctgggccagttctttcggacattttcttcactgatgatcttgttatattttgcaaagcggatgaacagcatggaaggcttttaaaaattattctaaataacttttgtgagttttcaggtcacaaggttaattccaggaaaactaacatcttcttttccaaaggagttgaggagcccatagctgattttctcagtaatttacttggcttcctgaaggtggatgatcttggtcattatcttggaattcctctatttcataagagagtcactaatagcacttttcactttgtgatcgagaaagttcgtatgaagttacaaagttgggatgctcgttagttatcttttgctggttgagctactcttgcgcaatcagttcttctagccattcccagttatttcatgaaatccatgatgattcctaggaagatttgtgatgagattgaatgtctggtaaggcatttcatattggggacctcagatggtaagaaaaagatgtcgttagtcggttgggactctatctgccaaccaaagtggtgtgtaggacttggcatgagacaattacgggatcagaacatcgttttcctgctgaaacttggttataaattagtttcagatgacgaagctctctagggtgaatgatccctttttagttagtatagcaaaggtgaagagctctttcctttggaagttgctttcaaaagtttggaaccttctacatgataatctgatgtggtctgtaggtaatggtaataaagttcggtgttggaaagattagtggattcctattgttagacatttgattaattacttacctgcctgtgctaacattaatactaattgtttgcttagtgatttggtcacaagagatggcaattggaaccttaattttttgcaagattggctaccagaggaggttattgctcacattatgagaattcctcctcctcatccagataaatgacttgataggctgtcttggcgacatacttaaactggagctttctctgttaaaagcgcatacaaagtgctaaatgaggactcttagagttctagagatgagttatggaagagagcgtgaaaaattctgggtccgcaaagagttcgcttatttttttggatagttcttcagcagagactcctcactaatgtggaactagttaggtatggcttaagtattgattcctcttgtttgatatgttgacatgcttcttaagatattttgcatattcttcaagactgcatagtggctaaggatgtctggaaacaggttgttctgagaaaccatcaacatcattttttttctaactctttgcacgattggatttctttcaatttacaggatactttgatactttctgatggggacatcaattgggcttgtctcttcggattattagcttagagactatggaagaatcgcaatctctttatttttcaaaggaaatcatggagctctagtgagatcattaaagtttcaatgtgttgggccaagcattcgtctttgacttccggagaaggcttgagtgatagtatagctttatcccatgaggagctttcttccaaggattagatctttttcaatattgattgtgctgttcaaaaaacttcaggaagagcagctgctggaggagtggtatgaaatggcactggtaactaggtgatgggttataacagattcttaggaaactactagatttttgatgcagaactctggggcattctggatggtttaagacccatccaacgcaaaggctataacaacgtgattatttattcaaatagcttggaagttgtcaaagctattcatgataacagttcgaagagctcaacttccgctttgatcaggagaatataccgaatcttgttccaagaaagtcattggattttaagatacattcccagggaggataaccattgtgtagaatacattgccaaactgcttttggaagaaaggaggatttacatctgtttgaatcccctctagatgaagtgttagatttccttaagtctgacaaagggagtatctttgttccttctgaacatctcatataattttatcttactttgttctttttttcacaaaaaaaaaataatgttattttttaaaatgtttataaacgtaattataagtaatgtatatctgaattaattataatacatcaccaaacacaatcccaaaataaaaatcaaaatattaaaaagaaacctaaaaattaaatgaaaataaatcttaaaacatctcattccatagtttcaactttggcgaagactcctaggggtggattggcatttatatggttatattacatactatgtctgaacgtagccgtttgtatccaatgcggtcaaaaccacctaaacataaaaatagtaaagccaattaaaaatataataaaaatgaggtggcaagtttttattgatttggccacggagttcgcactcacacatttcttacttgagcccacgaaaatccgaaggcactaaatcccagatatacttgccttaaatcaccaatcactttcctaatcagcttacaatgacaaacttcaaccaataataaccctccacgtaggaaatcgccgcacacaagagcgagtatgatttcagctctgtactcgcgatctagcaacttaccttttgtgtgtcattcactttttaaactgctatcatcactccttaaaagctctgtaaatctaagagacagaacggaccaaaagaagaagaaaaaaaaaaaaaggtgaaggtatattatagctttgcgataatggcgagaagtgtttgcgtttggtttgccttggctgcaattgtatgctctttatcggccatttctgctgaagaaagcagtgaatcgaaagaattcgttttgacattggatcactctaattttactgacactgttagcaagcacgatttcattgtcctcgaattttacgctccttggtaagctttttcatttgtgttcttaaagtgcatgcaatgagtttagtagacgatttagaactcaaggagtttgtcttataaatttttaaatggtgatgttaaattagatataattgtttttctgatgatttctttttcttggaaatgattttcaatttgagcttaaagtgcatgcaatgagtttagcggacgattttttattttaatctgtgttcttaaagtgcatgcaatgattatataaaatatatatataatttgaactcgtaaacggaaacaatcatttactattgaagcagcgagaaattttcataaatcctactttctcttgtaactagcatgaaaatcctattttgttatctaagtaaagcaaacatgatccatagttgacaacctacagatatatgatctgtacacttattctttaatttagcagtgaaatgcttccgttgcgagagattttacctgtttttcaatttacattttttttttgttttcctgatataccttgttagtgtcgtttaccttcttatgactaaataatcttctttccttgtactcttaggtgcgggcactgtaagcatcttgctcccgaggtagacaatattagattccccgaaaagcattgatttttcttgataatttatacgtttaaatggctgctaatgattaaacttcttgtttgttgtctagtatgagaaagcagcatccattttgagtaaacatgatcctccaatctttctagctaaagttgatgccgatgatgaagcaaacaaagatttagcaagccaatatgatgtcaagggctaccctacgcttcaaattttgagaaatggaggaaagaatgttcaagaatacaaaggtccacgtgaagctgatggtattgtagagtatttaaagaaacaaagtggccttgcttctgttgaaataaaattaacagaagatgccagtaaccttattgatgacaagaagatagtaattgtaagctctctgttctctgttcttttgtttcattgggttttcatcacaaagattagctgatatgtatatacatgttttttttctaggttggggtgttcccaaaattttctggggaagagtttgagagctatatggcactcgctgagaaattacgttctgattatgactttggtcatactttggatgctaaacaacttccccgtggtgaatcatcagttgttggccctcttgttagacttttcaagccttttgatgaactcgttgttgactttaaggtaactggttcattgaatgtatctatatctataagtttctgttgtttaagattagctattttacagaagttaattgcttacaggattttaaaccggaagctctagagaagtttattgaagaatctagcattcctcttgtgactctgtttaacaatgacccaagcaatcacccctttgttgcgaagttctataacagtcccaatgctaaggtaaattcaaaagtcagaaactagagtgtgactggtattcattccataaaaagcgttatcttggagtactaactttattcatgttttctaaactaccatataaaaatttctattcatccttttaagttcgtctactaatatgacttctgaatctgggtaggctatgttgtttgctgacttgagtactgaaggatttgattcattgctatcaaaatatcgtgaagttgcggagcaatacaaaggaaagggcattagtttccttttgggagatgttgaggctagccaagctgccttccaggttagtctctactcgaaaatggcgacatgtttaatgccttcgctaattgctaccttagtctaaacttttctgttggatggaaaatagtattttggagttgaagaaagccaagtacctctaatcatcattcagagtgatgatgggaagaagtattttaaaccaaatttgaaggctgatgacattgcaccatgggtgaaggatttcaaggtaatgaattttggtgatggttatcaagcataatgagatattctctttagtggttgtattctgttttgctcaccaaagttaactgcaggaaggaaaagttgtaccgtacgtgaagtctgaacctattcccaaggagaacaataaaccagtgaaagtggtggttgctgacacccttcaagacatggttttcaaatcagggaaaaatggtgcgtctatttagtagtttgctttatgctttttacccccgtatgatgaatgcttagaattggtatggaattgtatttctgcagttctgcttgagttttatgccccttggtgtggacattgcaaaaaattggcaccaatcttggatgaagttgctgtccattatgaaaaagatgccgatgttttgatcgcaaaatttgtaagtttttattgtatatttttcaatttctaaggtttcaatttcagtttagattctatatttttataatagaaaatggtttaaaaccaaacttgttcaccattacaggacgcaacttcaaatgatatattggatgagaactttgatgttagaggttacccaactgtctactttagatcagctaatggaaatattactccatatttgggtaatagaaccaaagaagacattgttgacttcattaaaaagaacagggacaaacctgtccatcaagagtcgcttaaagatgagctctgaaaaggccagggtgtaagtttgttgtttacattttcttaaaaaaaaaaaaaaagtgaatgggggtatcaagttttgaatggtgtttgtgttttggcagggatttgagcaaagacaaagatacccagtttcataaaagaaccactgtggactttgactgagggatgatgcttcatctgccaacctgctctcctctttttgttaactgtagccgcagcggctttctttttttcttttttctttttttaatatgaaaacatgtgtcgatgaataatgcaggatctgtagcctaatacaaattcgacttacatgaaaatgatcttctctggtttagcataatgtcttgttggacttcaatgacgtgaaaaaaattaataatataaacatggtaatagagatataataattatttgatagtgcacttaatattaaaaataataaagaaatcaactatgtttaataacttcaaaaatcgacttatatctaaattattatttttccttaaatcttataaaagcataacccaaattaattatttttcctattttgatacctaaatctttttagtgtaatctcaatgttaactttacataagttattaatttgatctttagatttttttagctaaatttaatctttaattttttaaaaaaaattaaaatccatcaattttcttaaaaaaaaagtctaaaaatgttttttaagaagaatactaattaaaatgtcagactctatgataattcacttgtactttatgataattttctttttgcaattttatgaattttttatttcctaaaattttcattttattttgatttttataatttttgaattattttttgacgcaacatataaaataaatgatgtttatgttaacagatgtgcatgcgaattgtcacaccaacaattttaaaaattattgttttagacatcatttttgctataaaaaggcggtttgattcttttttgtaagctaagagttaaatttaactccaaaaaaaaaataagggccaagttgatagaaaatgtataaacattgaggactaaatttatcattatatcaatacttttttatcataagtgatacctaaactattattttgttactcattttacacaaaatgtcatatccattaaaaaaatttcaaccaataataatttatcatgtcatgtaaacttaaaaaaatattttttaattctttcattttccttttttcttttacattatatatctctaattttttttctgtttttttttcttatttttttgtaatgtatgataataccaacaatgctaaaaatttactttcataaggccgagatgctagcgattaattctgtttttgaacttcttcgcttgcttacttgacctgacaagattaaaaaagttatttcatcgatcagaactagtgtttttaaaatcaaattggaacgccccattgaattgattgaggtatcgatccaaagataggggttaaaccgattaacctacaaactgatataggctagttgaaccaagctaaaacaattgaattgattttctctatttttaaatattttttatttttatgaatctttaataatttatttgatcgaacatgaagaattgatcaaattaagatctggtatcctaacctgtttaaccattggtccgattctaaacaaagaaatatatatatataaaagaggaaatgatattttgtccttttttgccatatgtcaaattttaattagttatttttttaaaaaaatagacttgacaattaatctatcagaaataccaatttgaaaaaaaaatcaagtaccacttgtaacatgatattttagataccaattttggggttaagctttttttttagatatatttaacgttcaacttagaaaaaaaaataatttagtttattacttgtgataaattttttttaaagtattataataagaaaatgagtataattttcattttttcaatttcttttggctacatttaaagaaaattatcccatataaaaacttgtaaatgagctgtaagtctttaaaaagattaaaaaattaaatatattaaaaaaaataaaggattccacaagttatgtgagatttttaagtgaagttgaagaatttttactgattgcatgaacatataaataatttaaaatatgaataaatataattttctaatgtgatttttatttttattttagataaatttgactattaattttgtaaaagagatcaaattaccatttttcaatgatgttggtaaaatagtttacatatcaatttgcttatttttaatgctaatatgacaatatttgatacggggttgcgcgcggaccaagatcgagttgccaagtcacgggaaactcctacgaaaacccttaaacaattagatctgaaacgaaacagaaaattaaaagattagatttttgaattttcagatctgaaataaaatccccaaatcagcaaagaatcaaattgagaatagaaataagtgttagggttcttgaaaccctcaaggagattgtgattctgcccaattgaacactaagatagttttccccaaatttcgacaatctaatttcacccaaaaagagtatggaaaaaccctagaaattggggatttttgggctgattccttaagatagaaaaaggctgaaaacacaataagaacagaaaatagattagataatgattcagcacaagtagaaataaagaaagaattgacagtaagaaattaaaagataagtcctaagaagccttgaaatctcgaaagatctcacaactcccttcaaacggctctaatctcccctccaaagaatatcaatggcaagaagaaggttgaagatggctcccacaatcaaaaagattgttaaaacaacttctaaagaaaactcaagagaaaatccttgaagaactcaaagagaattttcactcaaatcaaatctgaaattttcaatgtaattgtaatgtaatgtagggtggctggccaagccatataaataggcctttcaaatgttttcctaatttaattagaacactaaaactaaaactaaaaaaaactcctaattattttaatatggaaattcggccaagggtcttttatttgggactcttggactgaatataaaaatttaaactaaataaaataaataaataaaaataaaactttacaacttgggccactttgataatttggcctgattttcaactaagtatgggtggatttcttgattgggctgagaatttgcttattgggcctcgccttcaagaatttgggcttttgtgactcgtatcattccccccttcctcaaaaagattcgtcctcgaatctgaaaaatcaaatgaactcgactttcctctatcgaacgggactaatggcaattgagtccactgaaaagaatagccatgagatagtaaatagcaacggaaacaagcttgtagtccaatcataagcataacagaacaggtataacgcatgtgaatggacagattcagattaccatgcaaacaatctaatttactcaccactgcctcgtcaaatatttgaaacaaagatggacatgttttaaggcattcagtcgtctcacattgttcccacaaaccatgaataaattgcgagtaataaatcaaatggtaaacataatcgtcacaagtaggtatttgaaaagatttacatggttcacagagttgcataatcataccatgcattaatcgacggtctatagattcactcacacatgcattatcaaaaacaagaatctttttatcaaccatcaaaacagatagatcatcaataaataaaataggacagtcaagcatgtttcgatctaagtgttcatcaacacgatctttatcactatccgaggagtacaaaagtgtttcaaaggtttcaagcatcttacctcgataagcaaaagaataagggtcgattttacctttttcatttgaaacaaaccttcgttcatcgggggcatagtgtagtcgaatctccgttgttgagttaacctttgtcaaatggaactcaaacttcatgtacaaccacataaactgtttaaggcaagaatataaattgaaaacaaatttggcaaatttcgttaccttattctccaaaacagatttggacaaattcaaggattttacacaaggtaaatcaagagaataacaaatcacgcttcttttcgtaatgactttatcaaccacaatcgaagagtaacaattaatcggatcaaaatgatgggatcttttaagaactaagtcaccaaaagttttatcaataattttcaaatctgcactggactcggtttctaaaatttccttacctcgcttaccttcgggatcatgtagtgtgatttcatctttgcttaagttgatcgtatgaaagcgtctttcatttgagaggtattgaagttgaaagttatctttcgatctttcgggaacctgaaaagtagcaacacaagaaaaattcatatcttggttagtggaaacattcctcactagcctttcctcgtctttttcttttgtttctttttctaactcattttctcttctttcttcaacttctttttcaattttcttttctgtttcacattccttttcactctcaatctctttttgctctttttcattctctttttctttttcctcacttgttttaacagaatttctcagtttgatttggtcctcatggacttgttccggagtgagcggcactaaggtaagtttctttccttgatgcttgaaagaatacctattggtacgaccatcgtgagtgacttttcgatccagttgccatggttctcctagcaacaaatggcaggcttgaataggcattacgtcgcacacaacttcgtcttgatacttaccgatagaaaaggcaatgcgcacttgttgagtgaccctaaattggccttcgttgctaagcccttgtagttgataaggttgtggatgcttggtagtggttaagcaaagcttttccaccatcgtcgtgctggctatgttcgagcaactttcaccatcaataataactctacaaagcttaccttgtacatggcagcgagtatgaaagagatgttctcgttgctgctcgctccttggttttgccaaagatgattgtccacgatcatgaaaatcatcatccattctagtgacacgtcgagggccgcgcctttggggttggttatccctatcttccttaattggatctcgatattgatgtttttgattcactcgtatctcattcaaagtagtattcaatgcttgaagtgtagcatttatttgtgtgattgcagcagtatgtccatctaactgttgttggactttcataagtgcatcattattatcacctttagacatcttcaaaacctgtaaaaaataaacactcaacactcaaaaataaaagttagcaaacctcaccattaatcactcaaaaagaaaattcaaattctcaatgaggtcgaattcaatcttgtgagttctttatcagagtttatatcaaccaattagagagtgtgaaccaaactaccaaagaatcctaatttgcactatgatgccaaaaactgacgagacaccaattgattcgtgttgcaccgaggaagaagttgtgcacacgtttaaatcctactaacacaagaaacaagaaggtgttagataacgtaaaggaagaataaaggtaaacaaatgaaaacctacagctaagaatcaataaaaattgctgaaaacagaaaacccgaaaaactgcggagtaacttgacaacttcgttcgaggtgttcccgatctccaaaaatcacgaaattaaatctggagtgtccttatatatttaatttttgatctggaaaatttgggcaccaaattcaacccgctgaatatttttttaattttttattggatttcgtcttttttcaattttttgactttttcgacttatttttttgcgggaaatatttttgtatattcaataacagtgccaaaaatatgtatgtaaaatttcagatcaatcagaaaacgtttacccactcaaataaatttttttcgaaaatttttctgggtaaaactgctgtttgtaatttaaaaaatagagatcagtttagaaatcaaccaagaacacccaaaacgcccaaaatctgataccaaatgatacggggttgcgcgcggaccaagatcgagttgccaagtcacgggaaactcctacgaaaacccttaaacaattagatctgaaacgaaacagaaaattaaaagattagatttttgaattttcagatctgaaataaaatccccaaatcagcaaagaatcaaattgagaatagaaataagtgttagggttcttgaaaccctcaaggagattgtgattctgcccaattgaacactaagatagttttccccaaatttcgacaatctaatttcacccaaaaagagtatggaaaaaccctagaaattggggatttttgggctgattccttaagatagaaaaaggctgaaaacacaataagaacagaaaatagattagataatgattcagcacaagtagaaataaagaaagaattgacagtaagaaattaaaagataagtcctaagaagccttgaaatctcgaaagatctcacaactcccttcaaacggctctaatctcccctccaaagaatatcaatggcaagaagaaggttgaagatggctcccacaatcaaaaagattgttaaaacaacttctaaagaaaactcaagagaaaatccttgaagaactcaaagagaattttcactcaaatcaaatctgaaattttcaatgtaattgtaatgtaatgtagggtggctggccaagccatataaataggcctttcaaatgttttcctaatttaattagaacactaaaactaaaactaaaaaaaactcctaattattttaatatggaaattcggccaagggtcttttatttgggactcttggactgaatataaaaatttaaactaaataaaataaataaataaaaataaaactttacaacttgggccactttgataatttggcctgattttcaactaagtatgggtggatttcttgattgggctgagaatttgcttattgggcctcgccttcaagaatttgggcttttgtgactcgtatcaatatttatcttataggataaaccacagcaacttgctttgtcaactttaattgcaacatcatccaactattagtggtggattgcaccttcaatctgataatggaacatcaaatttccacaatctagttgcacaaagtaatttgtaaaccatcatctgccctcagtttgcgaagcttaacagttgctggtgtcaaaaccggcagaccagtattctcatctctccacaccaacaataccatgttatcttctttgaagagccacaaatacattgaggcttagttactcaaaaatgagtctccccatatttgaaccccagacatcctacacttacaagagtccttaccgaacccagactcctggcttatatttggacataagttgtggatgtatctaacactcaccctagtccagtctaatagcaatatagcctactcatgtatctaacactcaccctagtccagtccaggttagcttttgggaatcagaaaatgggaatatgactccatcaccgttgatgcttgcccacgacttcttcaagtgcaatgaaaaacaactcaaaagctacattcttccattttgaatacaaagtaacgatttgtcttggttccagttatcagggtggaaacaaaaacagaaaaggacgggctcaagtctcacagttacttaaaagaccaaaaccatacatctgatgttcgttattgacgatacaaagaacaagaacatgatgcataacaattggtacaactaaaatacatttatgtataaatatgaagagtcaaaaagtggtaacagacaacaaataaagtgaatgaatggagggaacttgaaaccaaagactagaagctaaaccatgatctgacaaatgcatttatatctacatataatcttagcccttaggcaccaataagatgatgagttgattgggtcaaccaaaatgtttatggtagtaatataaaacaaaagaaattaaagttctatccagtcctcccgggttgttggatgggaaatacaaatcatgtatcaatctgataaagaaaaaaattcgagttcgagcatagaagaccgaccagatgaaacgccataggtgtataagacttgagcctgaatcttcaatgcaagtatttgtgcatatggagattgttgtttccatgagaattcatcagccataccaaatcaaacaatggtttccatatgcagatgggataaggcctagaatgctcatattttaggccctttcacttctctatcttagtatcttctttttcattgttcttggcttgtgagttgttttgcatttcaagtaaattctgctgttcctctgtctcttgaactgtagcttcactgacagctttgggcttacagcttgtcgactgctgatacataacaccacctagcatacaaatcaagagccccacagtccccacgaaagtcgaatgtttgtcccaaataaccaaattaatcacaactgtcaatagcttgttaactataccaagaacagtaaaccctgtagcagaaattgcccttcggcaagagaacccaaagaaagatatggccaacccaaataaacatgataaacccacaggtagaatcacttgaaaagagtgccaatcagactcatccgagatttcatgctttattttcttcaactctcccattattagtagctcaagaggaaacaataggagagcctcaagattattgtacagtacaagaccccatgtatttagaccaatagtcattaccacatgctttatataaacaaaatctatagacatacttaccaagtatgcagcagcccaagtataggcagttaatgtgaactggtaatcagtaagaacataaaggacactgccgccaaagatggtgcctaatgagatccatgtcttcaatgaaggccaaggttggctcaagtaaagggtctctcctattgcaacaaatataggaaccgctgatcggaagacaatgaaagtgtcaacattagcatgtaggaggagctcactgttggtaaagagagagagataaaatataatggctgcaggtaggaactgccccatggtccgaaggtcaagtggatcatgctctaggaccttaaaccatccacagagaactacaccagctgcgcttgtcagatactgcaaagcagttagtgcccctggataaggaaatttcattacagcccatttgttgatgatggagagaagagaagctgaaatgcagtatcctgccgccactccatagacagatacttgctttagtacacaactataccatgtttcttgggcatcaccagagggaaccaagacttcaggaccacggtcagcaggatcctccacatccttagacatctaaaaacaaaacaactacaagtttattactaggtctagctattagcaagcacgtattgtgtatacatgcatttcacaggccctgtatatgcatgcacctatcttggctgcaagataaacatgcataaaaagtaatatttttctccagttgaggtctaaaatcaacataaataaaaaatcagtttcattctataaggaagcagtagaaaggaaatattgcaacatattgagcaacattttgggttataaaataacaatcagactcatccacagccaaacaaatctcttttgttgataaaataaatacttaaaagtggctttctagacagataccaaactacagaaggaacttctcagctaaaaggattagcaacacaaggtcaagtcatgggaatcaccgtttaatataaaaatgttaaagagttggagacaaatgcaatgtggttattagtaagactacaaacaaatcaatataaaaaccaatatggaatgcatcaaatttggaaacaagcactaagaaactgataatgatctaaactaaacaatttttaagattaaagtccaagataaatagccagaacccaagaaaatgccaaccctgaagcaaactaaggctcccaaagcacatctattagatatagcactcagttgactcatggctatattcagatataaacagaaagatatatgactctactactaccacgagcagcctcgtacagatgaaccaaggaatggcaagggcaggataaccacaattttgggtactgagacttgaacctaataatatttcacaataccaaaacccaaataactacctaactaaattttcaatcttgtcacctaaatcccacacaagttagataagtaaaatgtctgctaaatgcctgaatctcttaattacccaaaatttccaacacatcggttctgcagaaagaataaacagatcaagaaaagtcaataaatcgaactcttcgataaactacatcaaaatctttcaaagttcaaacagaaaacaaaaaatatagaaacaactgaagctaagaattgatgcgaagaaaaaaagtttcaagcagacaaataagaaataaatgaaacaaacattaggcatacaacgatctgcaatgctcctcaatcacggtgctcaaacagctctaggcctgagagcactgcaccactaccctgctgcatgattgcaactgagaaatatggtgtatgtcactaattccaactgataataaccttaggagaatcacatcccaagagctagctcctagggcaaaaggttatatctaaaaaggaaatcccatactttcatacggaatccaaagccccgtaccgcagttaggcatgtaccaatgaaaaaggaaaaagaagggattgcacaaataaaatgtagatttataaggaaataaaggcagcaaatttcactttcattgtatatttcatcaaaagaaacaagtctgagaatcgaaaaacaacatctttgcttaagattatgggctggaatggctctgataatatattgacagattacaacaaaaacccacaaaataaaaacaggggaagataaaaacccagatggaaatcagaaaatttagaacaaagtgaagtggagtaatgcaatgggtcaataaaaatgaaagagcatgacagtttcagatcagtggaacataggagtgcaagaggaaatcgagatttataaaagagaattatttacctgggaaaattagaaaggttgaatacactgcgtagatctttgaagtactggtagctacttgcgaaactgtttcttgcttgtattggtttttaattttaatctcactctcacttgttttcttttttcattttaaacggtgatgtgatgtgaaagctggttaaagattagagccaacccagatttggtatctttaagatgacatttcagttaagtttttccctacgatttgaatttttatagatttattttattttataacttttaaatattatttgataattttttaacaacttttaatatcataaaatatttattttatatcataacaatttagaataaaatatatattaaataaaaaacataattttatttggtttcgagtgactactttttttaagcttacattctataatccgtcacaacaccttagttaaaatcgattttcaacttttcttgctcaaccttaccaaaccctctcaatatgttatttattaatatatgatttttttaagttactcagtatatgtgtattttttggaaggtataaaattcttattatcgagcctttttggaattaaggaggagacaagaaaagagaattttggctgacttaattttaagattcattaggtagcatttggtaagatagaaaatagtcacttctaagaatttaattagttgaaaagttatttcaacatttggtatgtcaaattttatttagggtaaactatcaaaatagtctcttttgtgttcttttaacttttcttttttctttctttatttttcattctctcttacttctcctattgtttttctcccttcctcatctcttttaacgtattttttctgctttttcatttgttaaaacttttttatgtttatgaaaaaagaaaaggtgaaagctaaaaccaaaataaaacttgctttacatattctcaacccacaattacaaaccctcatcgtccatcatcattttagtgaaccaatttggatctctcaatgacctagtccacaaagtcgtctcactcgaagacctcaccagttatgacttatgacagtccactctcaacaatatttcacgagcctgttcccttaacctccttaccaaccgccacgaccactttatctatcttacctacaacattctcgccctctcggaactacgttgtctcacagattcttcaaacgagctctacactctcaatgactaaaacgaccacagtacaaagcttaccctcaactttacctgtaacaccccaaacccggcccagacgttatgaccggatccgacatgccatatcgaagcgttcaaaacattttatattgttgatccagaaaaacttacttagtgttttaaaagataatttcattataggttaaagtgaatggaagctgtgcaccaggtaggaaaccggaaaagagttggtgagtccatcggactgcttaagtaccaagctcccttcggatcaaatcctagacatgcatactgccattgccacaccttaacgtcatggatatttctaggaaaccgatttgattaagtcatttttaggaaaagtgattaattttggaaaatactttcattgcggaagctttgcttgttgtcgtgttattttgaaatcaattgttgtttttttttttgaaaacgcgccctaaagctatccaatctcaacagttaaaataagtaatacctatcttagtaatacatattaaaaccatcaaaaataattaagcggccttattacatttaaaaacccaaaacttcaaacgtaaataaaaagatgtccagttcaccagaagaaaatcaaactttcagaaaaagtggccactccgaattccctcacagctccaagcccactatggttggggattacctgcgtgtatgaaaataaaaggggtgagtttggggaaactcagtgtgtaaattaacccaaccatagcctatatcagctcaaaccatagaaatagaataagttggccttagcccagaacagaattcagaataaagcccataggcccataacagaacataacagatattacatgtttatgcagaaacccaacccagattcatctataacacccccgtaccagtcttacaccatgtggggagactactcgacccacccaaccgctacacaccacagaaatcgcagcgaggctgccagatattgtgacgaagtcaccagatacagataattgtggcatagccaccaggacagatatatgtggcagagccactagatcagataattgtggcatagccactaggacgcttcctccatagtataacccaagtccccatgcaacagatatataatcatggcatacatcatacagaatcagatcgtcatgcttttcagtcaaaagtaaccctaggggtataatggtaatttttcatacataggggtattcaagtaatttaactattcttaaggttttcatacataacatagccatttacgtacaatcagaaacacttaccgcgttttcttaccaatttgggcccgttggcccattatcccgtttttggcccattaagcccaaaaatatcgaaatgcacagaatcgcgcactctgcagtcttatcactttaatttaccatatacatcaaactattaatctcatgagtattcacacactcgcaatatcttaaaatactggcttttcggcatttcagcttttcggcttgtgccggtttagtctataagagggtgttagttacacacctgtttgcgacgatatgctgacgagatccacacacgaaccgcctacaattggattactaacacgttaatctaactattcaaatacaaactacgtattaaccccttacaatattcggccaaccacacctacagatcatagtaagcttataagaaaacaataagcaactcattaacaaatttttgtcaatatttaccacataatcataatttcactgcaagctgtcttcctgagcaacagtcactaaattatttataactggagttacgaaactccaaatcaagtgccgttaattttccctaaaaatagactcatatatcttatatccataaaatttttagaatttttggtatggccaatcaataccagatttttcttaaagtttcccatgtttcactgtttgactaatctgaccactcttcattacgaatcaaatttctcattgtacagaattcaaaatatgttctcgtttattccatttgaaactagactcattaagatttaattacataatttatgcagcttctaactcatctcccacaatttatggtgattttccaaagtcacgttactgctgctatcccaagcagatttattaccaaatcactctttcacacctaacttgcatgcttgttatttaaacatgtatatcaccaatcaatcatcacatatctatgattttacttaagtataatctccatttcatcattttaaagtataacatgttagccgatttttccccttagcatctaaggcacatgcatgctcatttgtttggctcaacttcacctatctttcatttttcatcaaaataacatgaaacaacaaccatttccttcattttaattcatgagtaaatgctcacaacacaactaaaaaccaaaatatgcttcaagagttaaggtagaatcaagaagaactcatgaacatcaagatagaagcaaactaccatgaacttaccttcaattttcttccccaagtgaccgaacattcaagagctttttcctctcctttctcttctctaactttcggttatgatgaacaaagatggacaaaactttgttcttttcacccctttttcttttaataaaatttcatatttcatccatttaattctttaatacaaaagacatgaaatgcccatcatagaacatttacctaagccattatcatggaacatttacctaacccattatcatggaatatttacctaatccattatcatggaacatttacctaacccattatcaatttgtaccatgaattatggatatcaagtgctcatattgtctacaacaacatgatggctggccacttcatgtaaaataggaggtttgacatgcaaatcctcctattttgcactactatttatttggccactacaaattagcctatagtattttcaaacattttcacataggtcctatttcataatttcactcacaaatgacaaaatcaaagcaggaaaatttgccaacattcacagaattcccgaaaattggggcgttacaactctacccccttaaagaaatttcggcctcgaattttacccgatccaaatagttgagggtattgttgacgcatagtctcttctgattcccaagtagcttcttcccttccatgattacgccaaagcactttcactaacgggacagatttccttctgagaaccttaacatctcgagccaatatttgcacaggctcttcctcaaaggtcaaatcagtctgaacttcaatttctgcaactggcatgacatgagcagggtcagaacgataacgccttagcatggagacgtgaaaacattgtgaatcctatctaactctggaggcaattccaattgataagctactgggcctacttgcttcaaaacccgataaggcctaatgaaccacggactcaacttgcccttcttaccgaaccttaatatcttcttccaaggagaaacctttaagaagaccatatcacctactgagtactcaatctctttacgcttcaaatatgcatacgatttttgcctatcagatgcttcttttaaccggtccctaattattctgaccttatcctcagtatcagctaccaactctggtccaagaacttgtcgctctcctagttcggtccaacaactaggtgtacgacaccttcgtccatacagtgcttcatacggtgccattcgaatactcgcttggtaactgttattgtacgcaaattctgccaacggcaagtaatcctccaaactacctcgaaagtcaatcacgcatcccctcaacatgtcctccagaatctgaataaccctctctgactgaccatcagtttggggatggaaagtcatactaaagttcaatcgcgtccccaacgcctcatgcaacttttgccaaaaccgagatgtgaatctgggatcccggtcagagacaattgaaactgggactccatgaagtcatacaatctccgccacatacagcttggctaacttttgaagcgaaaagtcagtacgtacaggtatgaaatgggctgatttggtcaacctatccacaatcacccacaccgagtctttctctgatggtgtcaaaggcaacccactcacaaagtctatggttaccctctcccacttccaaagtggtatcttcaccggctgtaacaatccagaaggtaattaattttcagctttcacttgttggcatgtcagacattttcctacaaactccgttacttctcgcttaagtccaggccaccagtacaattctcgcaagtcgtgatacaacttattccttccaggatgcatggcacatagtcccccatgagcttccttcaatattgtctgccttaaatcagagtcccttggaatacaaattcttcctcggaaacatagaactccatcaccatttaaaccgaactcagaagtttccccttccttaacttgttgaaaacgagcaaccaaagactcatcttccaactgtttttccttaatctggtccacccaggttggccttacttgcaattcaaccaacaaactgccatcatcatacagactcaaacgagcaaacattgctctcagatcagatacggttctacgacttaaagcatcggctaccacattagccttgcctgggtgatactcgatcgaacagtcataatccttaagcaactcaatccatctcctttgcctaaggttcagctccttttgagtcaacaaatacttaagactcttgtggtctgtgtatataatgcacctctccccgtacaagtaatgtctccaaatcttaaatgcaaatatcattgccgccaactccaaattatgagtaggatagttcctttcatgaggtttaagctgtcatgatgcatatgcaaccaccttaccctcctgcattaacatgcagcccaaacccacgtgtgatgcgtcattgtacacagtaaaatccttcccagactccggctgaatcaacacaggtgcttcagtcagaactttcttcaacttcgcaaaagcttcctgctgcttctcagtccatacaaacggtactcctttccttatgagttttgtcagaggtgctgccatcacagaaaaacattctacaaaccttctgtagtatcctgccatccctaggaaacttcaaatttccgacatcgtcctaggtagcttccactccaaaattgcttcaatctttcgagggttcaccttaatcccttcggcagagaccacatgtcctaagaaggttacctccctcaaccaaaattcacacttgctgaacttcgcaaagagttccttctcccttaacactcgcagcactatacggagatgctcatcatgttttgcttcagtttcagaatataccaggatatcatcaatgaagacgactacgaatcgatccaagaatggttggaacacctgattcatcagatctataaatgctgcaggagcgttcgtcagtccaaatggcataaccaaaaactcgtaatgaccataccgagtcctgaatgccgtcttatggatatctgcctccttgacccttaactgatgatatccagatcggaggtcgatcttaaaaaatacagaagcctctctaagctggtcaaacagatcgccaatccttggcagtggatacttatttttaattgtcagtttgtttaaatggcgataatcaatgcacatccgcattgtaccatccttcttcatcacgaatagcaccggtgctcccaatagagacatgcttggcctaatgaagcccctatccaacaactcttgaatttgagcctttaactccactaactccttcggtgccatcctaacagtgcgatggacacgggcgccattccaggcaacaaatctattccaaactcaacttctcggttcggaggcaatcttggaagctcctccagaaaaacatcttggaacttctttacggtcctaaccttatccactgtcaatccctcctcttctgactgacttacaaatgccaaataggcctcacaacctttccgaatccacttttcggctcttaaagccgacaccacattggacaaataatcccttcgctcacctatcaccataacctcctcatcctttgtggttcttaacaccattcatttagcagcccaatccagggttgccttatgcttaacaagccagtccattcccaaaatgagatcaaactctccgaacggtaactccatcagatctccagggaaaatcctaccttgagtttctaagggtacatccctatacagtttgtctaccctaaccgagtgacccaaaggacttagtacagataccccactcacaatctcctcagagcagtccaagtcgtccataatccattctgtagcctccaaccaatatttcgccacattcggggctataccagacacgcccctaaagatctccgctccgttagcccgaagtcattcaaaaatagatccccgaactccattgcccgcacttgccccggcaaccctttccagaacacgaagcattgactgtgacagggcatcatcctcggcatcgcggtcatgagactctacttctgttgtcagtggtaccggtgcatccatcgctggtaaatgtctcgaagacgaagatctcgctcgagcacttcctcggctccgtccacagcctcttgtactcatatcgtattatcttgattacgaatttttatgcatcaattaatattccagtgtttattacagatgttttatgaatcagacagtagttcagagtttgttttcgcagaatcgaagtctagctacaatttcagtctcttattagattttcctatggtttcagtatcatcctatctagagtatcctagcaggatttcagtacagacagataagtcaaaaaaatattcagaagagttcatagtaatacttacaggcttgggtcggagattcggaatgccaccttcaaagatctaaattttgaaaatcgcgtttttcgcaatctttataaaaaaaattttgtttttgaattttttttttgtaaacccattccacagccgagttgttgcaacctaggctctgataccactaaatgtaacaccccaaacccaacccagacgttatgaccgaatccgacatgccacatcgaagcgttcaaaacattttatattgttgatccagaaaaacttacttaatgttttaaaagttcattataggttaaagtgaatggaagctgtgcaccaggtaggaatccggaaaagaggtggtgagtccatcggactacttaagtacaaagctccattcggatcaaatcctagacatgcataccaccattgccacactttaacgtcatggatatttctaggaaaccgatttgattaagtcatttttaggaaaagtgattaattttggaaaatactttcattgcggaagctttgcttgttgttgtgttattttgaaatcaattgtttttttttgaaaatgcgccctaaagctatccaatctcaacagttaaaataagtaatacctatcttagtaatatatattaaaaccatcaaaaataattaagcggccttattacatttaaaaacccaaaatttcaaacgtaaataaaaagatgtctagttcactaaaagaaaatcaaactttcagaacaggtggccactccgaattccctcacagctccaagcccactatggttggggattacctgcatggatgaaaataaaaggggtgagtttggggaaactcggtgtgtaaattaacccaaccatagcctatatcagctcaaaccagaaaaatagaataagttggccttagcccagaacagaattcagaataaagcccataggcccataacagaacagaacagatattacatgtttatgcagaaacccaacccagattcatccataacacccccgtaccagccttacaccatgtggggagactactcgacccacccaaccgctacacaccacagaaatcgcagcgaggctaccagatattgtgacgaagtcaccagatacagatattgtggcagagccaccagatcagataattgtggcatagccaccaggacagatatatgtagcagagccaccagatcagataattgtggcatagccactagaacgcttgctccatagtataacccaagtccccatgcaacagatatataatcatggcatacatcatacagaatcagatcgtcatgcttttcagtcaaaagtaaccctaggggtataatggtaattttgcatacataggggtattcaagtaatttaactattcttaaggttttcataaataacatagccatttacgtatgatcagaaacacttaccgcgttttcttaccaatttgggcccgttggcccattatcccgtttttggcccattaagcccaaaaatatcgaaatgcacagaatcgcgcactctgcagtcttatcactttaatttaccatatacataaaactattaatctcatgagtattcacacactcgcaatatcttaaaataccggcttttcggcatttcggctttttggcttgtgtcgatttagtctataagagggtgttagttacacacctgtttgcgacgatatgctgacgagatccacacacgaaccgcctacaattggattactagcacgttaatctaactattcaaatacaaactacgtattaaccccttacaatattcggccaaccacacctacagatcatagtaagcttataagaaaataataagcaactcattaacaaatttttatcaatatttaccacataatcataatttcactgcaagctgtcttcctgagcaacagtcactaaattatttataactggagctacgaaactccaaatcaagtgtcgttaattttccctgaaaatagactcatatatcttatatccataaaatttttagaattttttgtatggccaatcaataccatatttttcttaaagtttcccatgtttcactgtttgactaatctgaccactcttcattacgaatcaaatttctcattgtacagaattcaaaatatgttctcgtttatcccatttgaaactagactcattaaactttaattacataatttatgcagcttctaactcatctcccacaatttatggtaattttccaaagtcatgttactgctgctgtcccaagtagatttattaccaaatcactcttttacacctaacttgcatgcttgttatttaaacatgtatatcaccaatcaatcatcacatatctatgattttacttaagtataatctccatttcatcattttaaagcataacatgttagccgatttttccccttagcatctaaggtacatgcatgttcatttgtttggctcaacttcacctatcttccatttttcatcaaaataacatgaaacaacaaccatttccttcattttaattcatgagtaaatgctcacaacacaactaaaaaccaaaatatgcttcaagagttaaggtagaatcaagaagaactcatgaacatcaagatagaagcaaactaccatgaacttaccttcaattttcttccccaagtgatcgaacattcaagagctttttcctctcctttctcttctctaactttcagctatgatgaacaaagatggacaaaactttgttcttttcacccctttttcttttaataaaatttcatagttcatctatttaattctttaatacaaaagacatgaaatgcccatcatagaacatttacctaaaccattatcatggaacatttacctaacccattatcatggaatatttacctaacccattatcaatttgtaccatgaattatggatatcaagtgctaatattgtctacaacaacatgatggctggccacttcatgtaaaatgggaggtttgacatgcaaatcctcctattttgcactactatttatttggccactacaaattagcctatagcattttcaaacattttcacataagtcctatttcataatttcactcacaaatgacaaaatcaaagcatgaaattttgccaatattcacaaaattcccgaaaattggggcgttacattacccaaaccatttttgttctacgctccatttctctcttcggttcatccatacttggcttccgaccaagcttgcttgagaatatcacaataaggtttagatcaaatttatcatttgcttaattttattcatcaaaaaataaaagaaaatgaaaggaataatctacatgattctgtaaaagtttagaaacggaacaaattgttttgaatataaagaattcaatttatgtttagatttgattaaggatatgattttttatattgattagttagacctaattttagtttcaaaattaagttatcttcaaatcgagatttgattaagaatgattgatattcagttttgagtaaaattcaatttaggaatcatatgaaagagacgaggacttggtttatttggtgggcaaagattatatttctacaatgaataatatgagaaaagagaaatagaagggaagaagaaaaaggaaaataaagaaattaaattaaaattttaaattgttcaaaaaattaaaagtataggggctagtattaacaaatggaaaatatagaaaaactattttaaaaaaatagagaagggaggaaaacgaagagagaaggagaagaaaatgaaaaaaaaaaaagttcaaagaacataaaagaaaaaaataaattgcttaaaatgaaaaaaatataaggaccaattgtataatttaacctaaaattttcgtttgaaatgatgatttaacgtgtcacgttagcttactattacaccattaatgacaattaactctctatgactaaaatgttacaacacgataacgtaagtgacaaaagcgtaatatttcaaacataagtgactaaaatgtaacctgagataaacaaaaatgattattttgatagtttattattttatttactttccttataatctaacttttccttaggagttactttctcataaacatggcaatgtgttttccaaaataaattgtgagcaagttactttccatgtaaattggaaagttaaaaaaaaaatcaacacaaaagtaaccatactttatattaatttactaatgaacataaaaagaacaagaagaagctattacatgcttcccttttcttactacttgattttttattacttcaacagatttttggaatgtaattttttcttttattttatattttatatcaatatttaattatctatattttctattttcttttcgttatattaattgagaactcaattttattataaaatttatgaatttttacaagcaaaagggaaaaaaaattaaggtttaagtttagctctaaaactgatttgatcataacctttttgcataatttatatttgaattatgatttgttgtatgtgattgagaattttactagaatgattttcgagaatgaataaatgattgaccatccatttagaagtagaatagataagacaagtgataaatcaaatttcaaagtaattatgtattatttaagtaaatatttttttttcaatatcaaaagtaaattatgttacactgaggctttgaaaaatgtaaaaattatcattcaatattaaatacttaactcaaatatttgttaagaataaggtttattataaaaataaatatatgaatattgcattttatttaataagggtaaatttataaattattattacattcctagaaaagttgttagtgaatcaaacctgataatgtaacttttttgggattttaatcaatacattttaatgtatattaaatattataaagtaacttttctggcaatcacattccattataatcataacatagggaagcaacaaaaactaccttaatgtcgagatatccctaaaatatattgtaaaaataacttttagaaatgtatatttttggagttttttttttcatattgtgaaataaaagtcttcccaaaatgttatatgacaacacagaaggagggagattgtgctctgcaagggggcgcccgagccaaagttgcgaacgtgaaccttattgggttcttttcacaacctactctacatccacatctaacctaagcaaaaaagaaacccgtatgaccctacatagcaccattaatatcataaacaattctcaaattttcctattggcaatgtaataccccgaaaatttttatagtaaaatattatccgtgatatagtaaaataaggaaataaagtgacaaaaagggaaattttgagttatgtcaatattgggaagtatattatgacatattgatttaagaaaggattaaattgtaaaagtgagaaaagttttgtggcccaagagtaaatactcaaaatttgaaggattaaagtgtaaatttgaaaagttgaaggactaatagtgaaaatattttaagggtggaatgatctagaaaccaaggaaaattgatgaattaggaccaaattgaataggtgaagaattatgagggactaaattgcaattttaccaaattaagtgatgactcaagaatggaattttaaaagatcacgaagggcaaaatggtcaattggaagagagagaaatctagagacaatgatgatgttggagatattttagataaattaaataaataaatattagtttattaatactttaaaattgatttttaaatgatattttattattttattattattttatttaatatatatatatatatatatatatatatatatatgaatggaaagaaaggggaggatgatatgatcacctttctcatgcaactaacgtgtgaagaagaagaagaaagaaagtttttcttttcttacaatttagtcctttctccaaaaattcattattttcacctaaaaattgaaagaatttccatagccatcaagagacaaagatagcaaggagatgatggggagcaagaatatcaagttggattcaagaaatagaagttggaggagagagaaaaatcaagttaaagatggaagtcaataagaaaaggtaagtacatcaagatttcaatatgtttttaagtttgttattattaacaaagcatggaaataatgttatagtagagttttcttacataaggtcctatgttcttgatatgttagtgaagagaaaataagagaaagtgatgagaaatggtgtagaaaaagaaaataagggtgttataacatggtaattaatatcttgcactaaaacagttctagacagcagcagtagtctaactttgaaaaatcaccaaaacttttataaatcgaattataggatgaataaaatatgagattaaatcttattgagtctagtttcttatagaataaacggtgtaagtaatggatttctaaatcatgagatataatgaattttgtgagacaaggttagaatgaattcgggttcccctgttttgactttggaaaatcataaaaaattggatagaaataattaggggctaaaatttatatttttagaatcttgaatgagtctattttcaatataaataaacagtaatatcatttgaattttgcacgaggatataattaatttttagtgaaaaagggtcagaactgtcagacaacagaacaggggtaactttaaagaataaactgtacttattggctaaaccaaaaattctgaaaattttatggaaagaatatatatgagtctattttcatggaaaattagcggatcttaatttggagctctatagctccagatataaataatttagtgactatgacacagatggacagtttgaatattcataaaagtaaataataaaaattatagatgatgttacttccaagtgtgttatatatattaaggaagtggaatggagaggaggaggaggaaaatatttatgaatatttagctagcatggctaatttgcctgttttaggcttaaggactaaattgaataaaagtaaaacttcagggggcaattttgtaaaaatgtcaaaatgaccaaattgaagggaatggattgttttattatctaaattaataaattgaatgaaattgtcaatttaagatcgagtgaaaattggaaaaatggtaaattactaaaatgtccctgaatcttaatatttttgcaatttcgttaggtaagttcgtataacttgaattatattcttaaatgcttgaaatgtatgttattgatgtgaatattatttgaaagttcattgtatgaaaatttatgaaacgttgatatatttgataaaaagggaagaaatcccggttgaatgaaaggaaatttcgatggatctctgagaaggaattgacggtaaaaaggatctaccccggacgggtgatcctaccctgatatagccctcctgaagaatatgtggaaaatggatttagcccagacgggtaatccgaattagggtctgaatttagcctggactggtaattcagatccaagctcattagagtaattgtcgttgcaagggatttagcctggactagtaatcccgacaatattctacgagtttatattacaggggatttagcttggactggtaatcctactgtaaggatgaggttcgcgggagtgtgctctctgatatgaaatgtgtaagaccatggttgaaagataccatggaatctgatatgaaatgtgtaagaccatggttgaaagataccatggcaacatgatatgaaatgaataagaccatggttgaaagataccatggcaacatgacaggaaatgaataagaccatggttgaaagataccatggcaatgtgatatgaaatgaataagaccatggttgaaagataccatggcaacgtgatatgaaatgaataagaccatgattgaaagataccatggcaacatgacgggaaatgaataaggccatggttgaaagataccatggcaacgtgatatgaaataaataagaccatggttgaaagataccatggcaacatgatgggaaatgaataagaccatggttgaaagataccatggcaacgtgatatgaaatgaataagaccatggttgaaaaataccatggcaacatgacagaaaatgagtaagaccatagttgaaagacactatggcatcatgtcaaagataaataagaccgtggatgggagacgcgatgacatctattgaacaattgatattcaggtaatatgcatcagatgacgaatggttatataaaatggttgtgtgaaatgtttacaagaactggtcatatggaaatatatgtacaaaatagttgtatgaaataattatgaagatagataaacgaaataagaataagtacatggaatataatttatgttaagtttgatataaactttaccgaaataaatatacataaaatatatggaaatgatggagcatgaaatattgatataatgaaatgattgatatatacttatgaagaaaaggtaagagaatgatatgtttcatgacatgtacatatatgattatctttgatatgttgatacaaggaaattatgtaagtaaagacaattattaaactcaagtgtgacatgtcgagaaaataagtatattaatgttgaatttatatgaaatatgtgcaagtatactaacaatgatgtggcttgacgcttagacaagtgtcaagctattgattgaatggtaacatgtttaattataagaagcattgaaatagtaagtacttagatgaaaataaaatttaagattttgcgaaattttttttatgatcccgatttaattccggttggtttttaatgtatgtttggggcttcgagggcccaataaagagacgttatgattattttcaaaatatgaataataaatgactcagaattatttgaaaatattcaataaactctggtaatgcctcgtacctattccggcaatagatacgggtaaggggtgttacaggcaacccattttcttcttgatggatttgatgagcttttcacagtactccaccatcacttattgttatccttttacaacaactaactttggacctgtaacactccctaaccccaaaccgtccccggaacagggttacagagcattatcggacatttacacttaatatacacgtaaataccaacacaaccagatacactcataatttgccaaatttaaacatttacatattatccaatatttaattctattcatatttaaaaaaatcatcaaatgaatcaatttcatatcaaattaaccaaaattctaatatatatcttaaccaaacctaaatctatttattacctccttacatttataatttcaaaatgacacacacataagacaccctaggtacatgccactaccaataattaacacactttaccttattgaactcgggatcggcctgggatgctgattcaacgttctatctttacttaacctgtgcacggaaacaaaccatacgctgagtataggtatactcagtgatatttctacaatccgaacatttaataatataacaaatacttaagatcataataacaattacaattattcaattatttatttcatagataaatttcaactacttaccaaataaattttatacaaatcatataataaacacaataacataattgttcaattcttaaataaatccattattatttattccattcttctcttactatttgttatagctttccttaatttattcacaattcaatatcaataaactatattcaactatgcatttatcaattatattccattttaattcatttcaataacagtcaatttcatttatatcatatcaacttactatctctgatagctttcattatatacatatgatttcatatatctcaaatcacatttcagttcatcaagtggcatcatatatcatcaattcgaacttcaatcatttcatgaacctttggttcatatttccaatctcatatctaaattttcaattctcaattcaatttctcgttccatttcaaaagcttgatcaatcaaatttattcgatttatctttcacttatttacccctattaacaaacccggactttgacggatacacggattccaacccaaacacaccagtacgacacattgtgcctaaaatgatacatagtacctgatcattatatgacacataaagtgcctaaaacaacacacgaggtgcctgatacgacacacgaggtgcttgaaatacgacacataaagtgcctgatcggtaaagccggtaaatcccgtacacttccagatcttatggcatgccaattatatccgactcagcccaattagttaatagggtatttcattcactttctcaatttaataattctttcatcaatataccattctgataatcacatatattaacccattttcacaattcatacaatttcattcaattcaacaaatatatttcaattattcacattaattcataattcaatacaattcaattcacttttcaatatcaaatattcaaacatcacaatctcatatattcatatcaatttcctcatatttccaatcaatatatttttcaatataacattcattcaatattcaaatttttacataaatcatatatattatataattcaatcaatataatttcaatcaatataaattcaataaattcatcgcatactaaatcaatccatttcaattgtaaaacatcataattcaatcactaacaattaccatatgtatataaatataacaaataataactaagttcggattatagaaatacaaactatattttctcgagctaactcccgttgtctttgccatttttccttgcttagctgagatttcccgagacaacattagctattaaaacttcaagcttcaaaccttcaattttcccttttcatctttctttttttcccctgctctctgtttcgtctcattctattctcttttctattcttttatttactttgatatatatatatacatgtatttatacttaaatagtaagtattatttatttattcatgtgtatattattaatacatttgtatccatttataaccatacatttgtcataatctagtatatttatttcataaaaaatcttataatatgatcatttaattagtaaatatattttataaataataaatatctattaatgattaaatacatgtattacaaatgtatatattttcatttgtacacttgtatcaaatcatatccacacatttgtctttatttaatttattcatcatataatattaatttaatgataataaatacattaattatttacttaaataataagtaaatacatacatattttacaaatgtatgtacaatatttattacacatgtattttatttttgccatacacttgtctttcttttaatttatttaataataacacctattaaataataataatagtttaatataaaaccataataataacaattataacatttaatatacataattcaagaaaaatcttgatttttcttccatttgccgcctcatctattgtcaaaggctgaattgccattttagtcctttttactttcttttaatctacaattcaactttcatcctttattcaatttagtcatttttcctaattcctcttaattaaactaaattcacttaattaaagcctagttaattactcaattaactttgtaattatttttaataaatattttctaatccatttttcagaaacagagacccgaaaatacaattttcctataaccttaaaattcgggttgttacaggaccaagtctctaaacttgagcttcagctactaatgccaacaatgcaaacactagtgtcatgggttgtgcatgggagcccacaaccatgacacatttgaatgatccatcttgttcgcgaagggtcacatggcccaacaggactagttcgttgcttgaagatattgaagacccatctataaagcatgacaaatatgaaacgtaatcttcgaagatatgcaatcttataggatttgtaatcttagaagatttgattttgtaaatattagagatttgattttgtagatagcttttaatcttgactgttgatgtactttaatttgcattgttgaatttgcagaagattaactataaatagatgtctctccccctcattgtaaatcacttcattgagtgatagaattctttatagcattcactcaaacaactcttttgtgcttttgtttttctgtggcttatctcttctttcgagttttttatcttttgagctgcttccgctttatgttggtgtcttagagagtcctaagaaaattctcaatttcgggagttaggctgacttaggcgtatttgaaacgaataaatcgcttaagactgcatggattacgagactaaatatctagccccgtgacactagtgcattggttctatcaatgatatccctattttagtttctagtaacaacaataccacttctttgtctctctctttgaatgagacttcgtagttaactttaatactcttttaaaggcaatttataaccttcaatggaattgagctttccctttaagaccaaaaatgagcattgttctatatttaaagttgacaatggaaagcaaaatctcaagtgaaaatatgatcctcccttttaccttcaaacacaaaaggtattgcacattttctaaatctctagcacaccgtggcaataagctccatctcgttgtaatggagtaaattcaggagcttggtcctaatgagaaaccaccattgaagcaccttagacataaaagtgatgatgtatgatgatgattaaaaagggcctcattggttgcagttgaactacatgataagcttttagaatgaacatattaactctaagtgtagttttcaaggtccaatcactttcccaccacatcatatcactacaacctttattctccactttagaagtgttgttggcatgcaagagataaccctacttcacacaatagcttttgaaagttttaaaatgatatttctaagcaatcttgagcagtgccaaaagcagtgctacagattagtgtcaactgcattaggcactaagtatgaataaagcagaaaaataattaatagaatatatgtcaattcggtttttcaacattcgtgaggtcttatccaaagagataattggaatctatatattagcaactcgtaaaacaaatgattacaacatctaatactcatcagattagatttatcgcatttgtacctaaaatctagataactctcctctatgttttagaaaacttaagacatcaaccaagtaacacttgattttcgcttaatgcactcacaataaacggtccttaatgaaccaaaataagtgctctcaactcattacaatatctacataagtctccttaatttataaggaattgggacttactaacatagtatctcaattacaatcaatatccccatataaccagcaagattacaagcataaaggatattttcaatgaactctgataagtcttgaatcttcaagatatacttcctagttttatcctattcaatccgattctaccgaatttggaaagtcggttgccttaatccaaacctaaacaatattcaaaatatgttgttataagtaatttggataccaaagattggcttatagttgtccaaagtaccaactagaatcgaagttcaaagatttttgttaccaaaatttatcaactttggtaggtttctgatcttgtagtgttagacaccaataggcaatggtccttgacactactcaaaaactatctcaacagttccatcatgtgagaaatgtcaaaataaatatttccccttttgatttcaacccattacttgctaaaaacaggtaaatgaatcaaacaggtccaaagcaaaataatggaacaaactctaaagaaccaaacctaaataggaattataagtattagttgaatatgaatcttatcgcacctcactcttatattattctttgatctaaacctccttcattctttctctcttttcactattattatttaatatttttaatgggttactatttggcatgtcggtagtgtatatttttattccacaaacaattttaaaaattttcttgtgcccttttttttaaatatttatttttttagtattttactatacccttatagaagaacacttgtcaacccctgattctgtttgcgaagtctaaaaactctattatcaatgtaattttttattatgctaatttcttttatgtatttttaaaaataattttatgtatttttaatttattataattaaaaaaattaatttttttatttttgaatttttaaaataaattctaattttttaagaattaagattaaattggcacaatatattataaagcttatttaaaaaaaaaaactaaactgacataacctataaatgatgatagttaaatttattactatttcaattagaaaagggttatgttatccttcgattagctattcaacatctagatgattaaaaaaacacgatcctaaatagctaggtgacttaattataattttttaaaattaaatgaccaaaataaaaatttaggcataattgaatgactaataatatagtttacccttaaaaaaattttattcaaaggaagtaaaggaaagggcaatagaagattatgggcataggtaaagcttttagtggtgtaaatagttgagtgcctatttacttattttgagtgttttaattttggttaaaattgaagtaattgattgaattgatctcattcaattaatcagttagttaattgatttaattcaattggaaatcggttaaatttttttttaaaatttcggttaatgattaattcagtttaaaattaagtaattaactgaattaattgaacttaataaataatattataaatttatttatttttatatattttatacttgttttaaaaaaatatatataagtttcaattaacttaaataattaaaaaagattaaaaaattaaaaaattccatgaattagattaacattagattcggccgtttgaaatgcagataaggtctcaaaattttggtaaagcgaaacaaccagaaacaggcgctgagaaagaaaccatgtctcaagaagatcaagaggaagaagttgggaaactggccgtccgcctagccaacgccgtggtacttccaatggtcttgaaatcagccttggagctgaacataattgacacaatcttagccgctggtgacggcgcgtttctgtcaccttcccagattgcgagtgcccttccttcaaagaatcctgacgcaccagtgctactagatcgaatgctacgcctgttggccagccattccattctcaaatgcgcagtaaaagcaaaggaaaaagaagaaattgaaagactgtacggtgcaggcccactatgcaagttccttgttaagaatcaagatggagggtcgattgcacctctccttttgttgcaccatgaccaagtcttcatgcaaagctggtaccatttaaatgatgctatactagaaggaggggttccttttagtaaggcatacgggatgacagcatttgaatatccaggaactgatcaacgattcaatagagtatttaaccaggcaatgtcaaatcatactgctttgataatgaggaagattgttgatgtttacaaagggtttgatgggttgaaagtgttggttgatgtgggtggtgggattggggttgctctcagttttattacttcaaagtatcctcaaatcaagggcatcaactttgatctgcctcatgttttggctgatgcacccacttattcaggttctataccaatcactcccttttatctcttgaacagatttctctgaaatctatatgaaattatgggatacttgttagtccaatctgatatgagtgtgtgttaatttaaagcattgccatcgctgggaaatgcttttagttgtgctgttttctctttacatgccttaacagtaagcacttgaaaccacaagcaaactagagaacaatatcattttctttcttgtttaagtctatctaattctatctgctattaatttatgataaacgaattcatctcaatttatgttctgcagggtagttggcaaagttgagtaaacccacattgctaagaaatgaacaagttaaaatatttatacatggtgttcgtttattgattttcatgtctagctcatctaaagagggagatatatatttgagatatatatttgaggataagcactttggtttgagtttagtggtgtaattatttttttatattataattattatattcaggggaagggaggggcagggctctagccttcaaaatggaaaattgctaatctctcaaaaattataaaattttaagttaatatgtggtaaagttataatttgctccccaaatgttagaatttcaatctaatcctttcaaaacctatcaaaatataaacgaatacagtgataaaattaaattttaacttttatgaaaatatataacttaatttcaaccactctaaaaaatgttctacctttacacatataattttaccaaaagtaattgcatacatgaataattacattgccaaaactgcatgcatgaataattacgttaaggtaatctattaacagggttaacctttttgaaaagatgtgaaataacacatcttttgccgaataaaaagtgtttgttcttgaacagatcccttttttgtggcttataccaaaaaaaaaaaaatacatattgatataccttttgctactctgctctattgttttgacttgttgtatcttagagggaaacttatagcattaaagaaagtgattacgcatcttgttctaaatttttctttcttacctcacatatttttctaacaatataggtgttgagcatgttggcggagatatgtttgaaagtgttccaaaaggtgatgctattttcttaaaggtaagcctttatgtcctatagcttggtaaatggagaactttttttctattttcttatcataattgatacatgtagaagttgtggaatctgtttagcttagtaactttatgaaacttgcagtggatactccatgattggagtgatgaacattgcttgaagcttctcaagaactgttgggaagctctccctaatggtgggaaagtgattattgtggaatctatcttacccgaggttcccgataccagtgtttcttcaaacattgtctgtgaacaagatctgtttatgttagctcaaaacccggggggcaaagagagaaccctaaaggaatatgaggacttagctttaaaaacaggtttctctgggtgtgaagtaatctgctgtgcttataacagctgggtcatgcaaatggagaaaagggcaatttattgaagttctattggaagcttccatttcctttcatctaccccaacaggaggattcaacataatgtttactttttataatgtttgataatattctaggggtttactcaaaattaccttctgttgtcagtacttttaagttctgctagaaatgatgatgatttatgaaaagaaaattctaaaaagatcccgagacatgcatatttatttgtattatgaaatttctaaaaggaaaaaaaaaacgaaagtacttattatgttaaataaaacaaaattaatgctcaaggtttgatttggttatttctttttatacttatttttcgctatttatctttttacttcttgaaatattgcagttccatgtagcaaaaacatgataattgttgcatataggttttgtgtttttatgatcccaacttaatatttaattgttaaatttattatttaatttgtagggtaatgcattgaaaggtgaaattgattgttaattgttgtaatttgattaaaaattatggtaagtaattaaagtatgaattattctattttatgattgaaatggattgatttggaatgtgttaaatttattgaattgatgataaataaattgaaagtgatattgaattaagaaagtgaaccgaaaatcctattaacagtattcgggctaagtcggatataattggcatgccataggattggaagtgttcagggatatttcaactttgtgtcgatgagacactataagtgtagccttattgttactgttccagattcgttccgaagaggtactccgtaccttactgttactgctactgttccggatctgttccaatgaggtactctgtgtaccgctactgttactattaaggtgtatttcggctccggccgatgaaacactatatgctatcctggtgtgtgggttggatccgtgtatctgtccaggttcgagtcatgttaataggggcaaataaaggtactcaataattgactgctactgaatatttgactattactaaattactgattattactaatgactgactgatactgagcaataaagatcaattgattgctattgaatgacaataataaattgattgatattaaaaagtactgactattaccaaaatggataagtacaaaatactagttgaaatgtaatagttgaatgatatttaatgttactgaatagtgaacgagtgagacatatgaattaagtatctctgaattatatatgaatgggaaatattattgttcaagtgatatatgaatttattttggaaagccaatcggattaatagatgataagaattgaatgagttataaagaatttacccatgaaatgaataattgaatatttatggtcaatatatgttttaagtgtatgttatattattaagtatttggattatagaaataccactgagttcatactcagcgtacggtttgttttcgtgcgcaggttaggttaaggtcagaccattaaatcagcatcttaggccgatcccgtactcaataaggtaaagcatgtcaattgttgataatggcatgtacctaggatgtcttaagtgtgttattttgcattgtgattgtaatagtgaaataagtaaattgataattgataacgatacatgataagtgttttaagtcaagtattggattgatttagtattggtatttgtattggttgtggtttgaaatttgcagggttggctaataaagtgtgaaaggttcattattgagtccatacagcctggcacacgggtgtgtgactagaccgtgtgagatacacagcttgcacacaagcatgttgttaggccgtgtgtctcctacacctaaactgctacaaaacatattgccacacgggatgagcacatgggcgtgtgtcttggccgtgtgaaattaatttgttcataggcaaaagtcagagagctccatgggtaaagcacacgggcgtgtcacaaaaaccacatgggcgtgtcacataagccacataggcgtgtggtactgttcataaaagggagatattaaaaattttatgaaaaattttataagcttctgattgagtcccggtttggttttaacatacgttttaagtctcgagggcccattaaaagaatattaagatatattttatgaactgaattgtatttctttctctattaattgtaatcgaactgtagtgaccagtaatactccgtaatcctattctgactacgagataaggttaaggggtgttaaactacatcctcttgtttgttcattttgaccatggaagcgaaagtagctagggcatcaaccatctgattttcatctcacgaaaggtagcagaaggtaatgtcatcaaactctttaattaattccaagactagccttctatactcaatcaacttgggatctcttgtctcctattcacttttgagttgatagatcactagtgcagaatcctcatatacctctattacttttatcttgcgttctatggctggacgaatacccatgatgcatgcttcgtattctgccatattgttcatgcaattaaaatttaatttactattaaagggataatgatttccgtttggggataccaagactaccccgattccgttacccatagtgtttgaagccccatctataagacccttaacccgtatcagttatcggaacagggttacaaggcattacctatcatatcacatcattcatatacaagtttcaaacactgtttacatatatcatcatatctcattcattcataaacacattgtcccttatataggtctacgagacctcaaaacatgctttaaagaggttcgagagtaaaccgataacattagcaaactttaaaaagcttagaaaatttcaaacttaaaaagggtcacacacccatgtgaataggccgtggcaaaacatggcatacatactgacttcaccacacggccacaagacacgtccgtgtgccatgccgtgtgaaaattagggaggttactaacttggccacacggctgaccacacgcttgtgtgtatagcccatgctcgaaactgatttgtataactaagttacaccagacatacggttgagacacacgcccgtgtgctcaattgtgtgggtgaaattaggcttggtttaagccacatttcccacctatctcaagcataccaaaaccacaacatttttgcatcatttgcatacatttataggtaaccaaatcatgccatttcatacacataattatatcaaaaccatttcattcaaatttcataatcatttcaagtcaaatatctattcaaaacttatatcatctacagtcattcataagcatatatcatctctattatcaactaattcatgcttcccaaacacatcccaaatcatcatcttcatatcattccacaacaaccaaatcacaaggtaaccattaccacaattatcacttatcaaactcatagatcaaaccaacttagatggctaaaaacacatcaacattacaacattacaacattcataagccaaaactcatggctaattacatcaaacacttaggcatcaattgccaacattacttatacacgtcataaaccaactagcctatatatgccatataaataatttcacaaagcttttaagtgctcaaacaatagttggatagtgtgatacgatctccgatgacttctaacctgagcaagcctctgaaacactataaacatagaaaagaaagcaaagtaagctataaagcttagtaagctcgtatggctaataaactcataatatcaaatgaccataatttaagcagttactcaaagtataatttagctcttataatttcatcattctatcacatactgtaacggcctaattttcagtggtgtcggaaatggtgatttgagatcactaaatccggcaagtaagatttaacaagatagtaattaaatatttatgagtcaagtaagaatttagaagaatttttgaattgatgaatttggtgaattaaaagaatttattaggtcaaacgggtcaaaaacgaggtatcgagacctctaatttgaaaattgagctataaatatttttataaatatttatgaagtgtaatttagctagtattaaagtttggttgagaaattttaacgtttgggtagtcaattaaataaaaaggactaaattgtaacaaatgcaaaatttgctagaaggattaaatagctcaagtgttaaaataaagaggatttaaagggaaattaagcctaaaagtgaataggctggacggcaagggcaagaaaatcagcggaaaaataagggaaataagggcaaaattggaaattttacaattttaacatataaaataaggacaaaattgaaaaatctagagatctcttcatattttctcagccaaaacggcatacaaggtctggcgaaagctaggttttcatatttttacatcatgtgagtttaattcttgctttttcttgataatttttatgtttttatgacttttacaattaggtccacttatagaatttattagtttttgattttatgggtgaaattggaagttaccctggatgagtaagggaattttatgatgaattattatgaaatttaagttctaatttcatactaaggtggttttattaagtgattttgatagaaaatgatatttaggacctaattgtgaaaaagttgtgaattgaaggttggtgttgaaattcagaatgtcaaaggttttgaaatagtttataatgataaaataaagtgttaattgagaaaaattggttcaatttatgggtgaattgagcagggactaaattctaaaaactaaaaattttggggtaaaagtgaaattttgaaagttgaagagcataaattgtgaagagaaatagaaattaaataaatgctaatgagtggaaatattttatattatagatcaagagtccaaaggagaacgaggaaaagaaaaagttacagaatagtccttaaatttcaatatcttctacaaattagccgggtaatttcatatggttgaattttgatgtttatttgtgaatgattgaatgatataatgtgttattatatatgaatttgttgtgggattgtgaaaattttgttaatgaaagaataaatgtggaaaatgcaaattaggaaaaacgcaggaattgagtacgttcgtatcgtgacatatgatgaattgacggataagaccatggttgttccatggaaaagtgtgaaatgtaggtatggtatcatccatactgagttgtgaaatgtaagtatggtattatcaaatccatactgagttaagaaatgtaggtatggcatttcccataccgagttgtaaaatgcaggtatggtatttcaatgaggaaaaccatactgagtttatgaatcgtggcactgaacaacgacgtactcaattttacaagccgtttcctaatttaataataagaaatacaagagaagtgaaccaaatgaaagagattgagtagttgttaatgttgagctcaactatgtgaagtattataacagtggttgtgaatggcaggaaactttagtaaatgttttgatattgtttggaaatattatgtttgataagcattacttttaaacctatgaacttattaagcttcaataagcttacttgtgtgtgtttgatatttttatgtagattgaattgaagagaagttggtagatcggatcaacacaacaaagcacactatccagatcaatttcggtagtttttgttttatatttaaagatttatatggcatgtatagagtttaaatgaattgaagtaaagatgttagaaactagttaacaatattttgtactaaaacagtttttggttagtagcggtagtttgactttgaaaattcaccataaattatgaaaatctaattttaggttgaataaatatgaaattaaatcttattgaatctagtttcatatagaagaaacgttgtaagcaaaagactttcatatcaggagatatttgaatttttgtgagataaggtctgagtgattttgagctcccctattctgatttgtaaaaatcattaaaaattgtaaaaaaataattagaagtcataatttatatttatggattccttattgagtctatttttaagagaaacaaacggcatggttatttgaattctgtatagggagaaatttgatttgtagtgcacaggggtcagagtagccgaaccctgaagcaggggagactttaactaataaactgtactaattggcctgaccaaaaattgtagaaaaaaattagtaagtagatatatgaatctagattcggtaaaaattacggatttggattttgagttttgtaactcgagatatgatttttttagcgaccatgatgcagttggacagcttgtctagaaagtatgatataaattgtctgaatttgtttaagtggtcaaataagtttagtaatacctcgtgctcgactccggcgacggtctcgggtaagggggcgttacacatactcattcgcatcatcaaccattagtttcactaatctattaaattctatgctcatatgatctgagtacatgttcttaattcatttaccatttcatatgcataagcaactagacatatattacattcaattcaatagctatcacctttatatagccaaataaaccataggaaacccataaatttccacctactcatcatatgaattttacacatgtcatttacttgtcgatttctgtatgaatacctaaactgattcacatcatcgcttatatttctttgtacatcatctttagtcattaactcgtctacacatcgatgaaagcacaatatctcaatttaatattaataaatataatgagttcataaatctttcacatttcattcacaaacttaaatatgaatttcacaagtttctttgtttcaatctcgtatataacttttactttatcacatctttggcatatctgttatccatttgtaatatttttggatacctagaaactcgcacacttagtgccaaataaatagccgaagctatatcaatctcgcacactaagtgccaatatgtatatatagctggagctatctcaatcatgcacactaagtgccaatatatgtatataaccgaagttatctgatctcgcacacttagtgccaatgtatttagccgaagctatttggtctcgcacacttactgccaatatatttagccgaagctatctcagtctcccacacttagtgccaatgtacaatatatataattgaagctatttaagtttagcacacctagtgccaatacatagccgaatcgtcgtcaaacatgtctataatctcgtattcacatttagacaatattaaagcatttaaaacatcattatatcaatgcttattactcaatcgttagaacgacgaaatggatcgactagcccgaatctttgcttgtcctttgatctagacctacacaaggcttaacttgatctaaataatcaaattcaatccatttattatacattctatacaatttggtccaaaatacatatttttcaaaattacacttttgcccctattatttcacatttttgcaatttagcccttatcacataaaatcacaaattcatgaaatttcatgctacccatgcttagccgaattcttcttattgtcttaacagcccacattttctatataatcacacttttaaccacataatttcaatatttcataatttaatccctattttgcatttttactcaaaatcacttaataaaacttgtaaaactatcatcaaagtttcataatccatcattaaaaatcaattaacacttgtattcaacaatggcaactatcaaaatctttaacagttttgaaatcggaggtacaggctagctagattacaaagcaacgatttcaaaaatgtagaaatcattaaaaaccgataaaaaatcgtacctcaatttggaattgaagttgccgaaattaaaagcacaaaaatggcttctcttcactcaatatttggtaggggaagatgaatgaaacaccatttttcaatttgttttatttaattattcattattataacaaattacaagtatacccttaattaattcttctaaaacacttaataagcaagcccataattgtccactcataaagccaatggtataattaccaattaaggactcctactatttaatttcatagtgatttagtgcatttaactaatagatctcaacttttacactttacgtgatttagccttttttaccaaattaaacactcaaacataaaatttttcttcaaaactttcacacaataattctatcatgctgtaaaatttaataaaataataaaataattattttgactttggattgtggtcccgaaaccactgttccaattaaccctaaaaacgagttgttacaccatcaaaatttagtttctagagatgttcttcttgagcactttcttcagtagtcgcaacatacatcagatcttcgtttgggaactcgaaattcaaaggctcgtaatcttctagggctctgctggctagaaaatttactattatactcccttttactgccttctggttcacatagactatatcaaattcgaaaagcagaatttgccaccgggtcattcttccatttaaagcagtcgactccatcatgtactttagagggtctattttttagatgagccaagttgtatggtacagcatgtattgtctcagttttcgggctgtccaaattaaagcgcaacacaacttttcaatcgacgagtatcttgtcttacattcagtgaacttcttactgaggtagtatatcgttctttctttcattcctgactcataatgttggccaagcacgcatcccatggaattttcaaatattgccaagtatagaatcagcagcttatctaggctaggtggcatcaacactagggtattggacaagtaatgtttgacctttttgaatagtcttctggcactcttcatcccacacgcttggattgtgttttttaaggagaggaaatatggggtagcatttctcgatcatttgcgaaataaactgggtgatataatttaatctccctaagaaatcccagaccactttttgagtgcgcggtggaggtaactcttgtataacgtcaactttatctgagtcaatctcgatccccttttcactgactacaaatcctaacaattttctcagctagccccaaaggtacatttttttggattgagctttagctgaaattttctcaacctcaagaacaatttcctcaggacttgtatatgctccttttctatttgggattttgtaatcatatcgtcgacgtgaacctcgatttattcatacatcatatcatgagacaaagttaccatggctctttaatacgtcgctctcgcatttttaatctaaatagcatcactttatagcaaaatgttcctcacggttacgaatatggtctttttcatatctttaggatgcatcttaatctggttgtatctggagaagccatccatgaaggagaacagtgaataacctgtcgtgttttccattagggtctcaatgtgaggcaatgggaaattgccctttaggctggctttgtttaaatccctgtaatttacacatatgtgcactttccaatctttcttagggacagggactatattagctacccactccgagtatttaaccacttgtaggaaaccagcgtcaaattgtttcttgacctttttttattttcaacaggacgtcggtcctcatccttcagagtttctgttgaactggcttgcattcttcccttttggggagtcggtgtaccacgatattagtacttagcctaggcatgtcttgatacaccatgcgaagacatatttgaattctttgagtaactcaatgagatctcgctttgtctctgcggtgatgaaagctcctatcttcatcttttttttcctgtttatctcccaagctcccaatttctactgactccttatgaggtagaatttgtttctcctcttgttctaccatccttaacaaattaggagatagattacaatctcgatcacctttaacgtcttgaggttcctctaaacacatatcttgctcaaaaggagattttgagtcagtagcagcatcgctcatatcgttgatatctagagacctattataggaacgaaggaagacccaaagaacaaatgaacctaagaataattatctgagtatgaatgaaatgaaaaaatagaagaatatttgccaagttggacacaaagatgaattttattaaaataaaaaaatagacatatgtttttttcacaaaaggattcttattgctcccaggcctagagtaataagcatttttgaacattactttgaaatggtcctaaaaactatagggatctcctctatagtctagttgttcagaaaactcccggggatgtaggaacaaattcttgataggttctttagttccttttctaaaccctcgatattttcaagaatttcgattcttagttatccgtcaggctatgtactagagttctgaactcgacgcacttttggatttcaagaaacttattacatgcaatgaaatgtaatgttgataaatggaaagatacatgcaaaaaggcattgattctagttcaattccattagaacaactttactagaaaacaaaattcttttcataaaacgaatacatatatagcctcgacttcacactgaaaaccttaactttcccaagaaacaaagctaattctcgaccccaatccgattccgattcatatttcaggctttgaacggtttgggtctgcaagtggtcaaccacttatcgtactcggaccaaagctttgctcataacatgatccatatttctgacctgcccctttcacatgttgtcacctttctcttattaccttttctaagaccatattctcgcggacatgttgtcttccactttatcaagaaacctctttttccatgacaagctctctatttagcaactgaacatgaatcaacatccttttctatgatgaaaatataatgcaatcgttgtcaaaacaaaacgaaaccagttagtacatttcatacaaagctagaatttaaagcaaccaagaaataatttatgaatttttacaagcaaaagggaaaaaaaactaaggtttaagtttagctctgaaactgatttgatcataaccattttgcataatttatttttgaattatagtttgttgtatgtggttgagaattctactagaatgattttcgagaatgagtaaatgattgacagtccatttagaagtagaatagataaacaagtgatcaatcaaatttcaaagtagttatctattatttaagtaattttttttcaatatcaaaagtaaattatgttacactatggctttgaaaaatgtaaaaattatcaattagatttcaatattaaatacttaactcaaatctttattaagaataaggtttattataaaaataaatatatgaatattacattttatttaatatgggtaaatttttaaattattattacattcctaagaaagttgttagtgaatcaaacctgataatgtaattgtttttggattttaatcaatacattttaatgtatattaaatattgtaaagtaacttttctggcaatcacatttcagggaatcacatcccattgtaatcataatacaggaaagcaagaaacactaccttaatgtcaagatatccctaaaatatattgtagaaataacttttagaaatgtatattaggagttttttttccatattgtgaaatgaaagtcttcccaaaatgttatataacaacacagaaggaaggaaattgtgctctgtaagggggtgcccgagccaaagttgtgaacgtgaaccttattgggttcttttcacaacctagtctacatccacgtctaacctaagcaaaaaagaaacccgtatgaccctaaatggtaccattaatatcataaacaattcttaagatttcatatgggcaaccaattttcttcctgatggacttgatgagcttttcacaatactctaccatcacttattgttatccttttgcaacaactaactttggaccaagtctctaaacctgaacttcaattgctagtgccaatgatgcaaacactactgtcatgggttgcgtataggagcctgcaaccatggcacatttaaatgatccatcttgttcgggaaaggtcacatggtccaacaagactggtccgttgcatggaaagattaaagtcttatctacaaagtatgacaaatatgaaacataatattcgaagatatgcaatcttatagaattcgtaatattagaagatttgattttgtagatagcttttaatcttgatcgttgatgtattttaatctgcattgttgaatttatggaagattaactataaacagatgtctctccccctcattgtaaatcacttcattgagtgatagaattcttaatagaattcactcaaacaactctcttatgcttttgtttttctgtggcttttctcttcctttgagttctttatcttttgagttgtttccactttacgttggtgtcttagagagttctaagagaattctcaattttcggagttaggctaacttagtgtatttgaagcgaaaaaaatgcttaaggctgcacggattgcgagattaaagatctagctccatgacattactgcgctgattctattaatgatatcgctaccacttctttgtctctccctttgaatgaggcttcttagttaactttaatacttttttaaaggaaatttataaccttcaacggaattgagctttccctttaagaccaagaatgagcattgttctatctttaaagttgataatggaaagcaaaatctcaagtgaaaatatgatcctcccttttaccttcaaacacaaaggtattgcacattttctaaatatctagcacaccgtggcaataagctctatctctttgcaatggagtaaattcaggaacttggtcctaatgagaaaccaccattgataaaccataatttagacatatttttaccccaatgcttggcataattatggatgatttattataagatttagtgaatttgatgctcctaatcctttaatttcatgttttaaactcaggaaagcctaaaaaagcaaaaagagtgagaaacgggccaaaatggacaaattgggcctaaattatgtttcacatggcctaggcactttcacacgagtgattcacatgctcgtgtgtgacacacgggtagaccacatgcccgtgtgtaacatacgggaagactacacgcccgtgtgtaacatacgggtagaccacatgcccgtgtgtgatagtcatgtctatattaatccaagtcagaattgcacacggcctaagcaccacgcccgtgtccctgtcgagcctaagtgttgttctactcagaaaaggctacttttgggctattttgggcattttgaagtctatataatcaccctagaagaggattagggggatacggagagttgaaggcagaaaatactcaaggatagccatcagaatcatctcagaggcaggatctacatcaagactgaagaattccatccaatttcctagaagttctttgggtttctttatgttttgttgtttcctaaactttgagatgttttccattattattatgaactaaactccctaaatacctaagggagataaaacctaggacggatattattattatttgagttatatgataaatacttgttcttatttttaattgtgaatttaacccttgctttaatattccaggatattaattcagttttttgatgtgcttattcagtggagcaaaagtctctgtttaagagtagatcattcatcattaagcggagttgcatgcaatcctagagataggacgacataaatctgccgaattagagtcaaatctaataagggaatccatagatcgagttaacgcgacaataggggttttaatcagaaagagattttgattaatcaacctagagtcagttgtttttagtctcgaaagggatattaacataaatgagggatttctatggattaagtcaagtgaataaatcgtctaattcaaaagtaataagtgaagtctagatggattcttccttgggtattgtcttctccattggttttctaaaaagtatttttcaaccttaatccctatcgtaatcttagttaattagataattagttttagataaagcattctcttatttttttaggctagataataaaaagatagtaatgactagtactttcagtcctcgtggatacgatattttcggtctcaccataactatactattgttcaataggtgcccttgcctgaagtcaaatttttagttagtttcatgaccatcaagtttttggcgctgttgccgaggactaaaatattaggaacgcttaatttttattactttagccatttttcattattgcaatttaattttgttttgaatttttttcttaattactaaattttcttttacttctagcatgtttttatagtttatgactagaaaaaacccgtcaggacctctagttttcgacagtgagatcgaaagcacagcttgcagaaaccgaagagaaataaggcaaagcctacaatacatagaggaggggaaagaagacaatattcacaccacaaccgaggagatggctgaaaatcaaaataatccgctacctcctatggtccagtaaattagaatcctgctcctcgtactatgtatgattatgctaaatctactttaacaggaacttgatagattatagttagacctattttcgctgcaaatattttttaactgaaacctaacacgattcaaatgatactacaatttgtttagtttgatggtttgcagaacgaggatccaaacactcatttagcaaattttttggaattctgcgacacctttaagatcaatggcatttctgacgatgccattcgccctcggttgtttcccttttcattgagaaataaggctaaacagtggttgaattcgttaccgcgagggtcaatcaccacttggaaacaaatgaccgaaaaatttttacttaaatattttccgccagataaaacgactaaactgaggaatgatatatcttcttttgtgtagatggatttagaaactctttatgatgcatgggagagatacaaggacttattgagaaggtgccctcaccatgggttacctctatggctctaggttcagactttctacaacggtgtgaacacctcaacaaggcaactgatcaatgcagccgtcagtggaactttaaacaagaaaacacctgaagaggcttacgaatttattgaagagatgtcactgaataactatcagtggcaagtcatgagaacaaagccgacaaaagcagctggtgttttcaaccttgatgcaatcactatgctatttaaccaggtagaaatttaaaataaaaagattgatggtttgtatggttctacttaggtacattcagtgatgaggtgtgattcgaatggaggaggagtgcacaacacatattatccacccttcaaccctagcaatgaggaggaacaagtccactatatgagtaataattttagacctcaaaataatctgtatagtaccaattataatgcaggttggaggaaccataccaatttctggtggggtggtcaaggaaatcaaaggccacaaaatcctccaagttttcaacaactaccttaccaataagagaagaaaccgaaccttgaagagatgcttacaaaattcatatcggtgtcagaaactcatttttagaataccgaaacagcgcttaagaatcagcaaacatcaattcaagggctcgaaactcaaataggacagcttgctaagttgatttctgaacgaccacaaggtaacttgccaagtaacactgaaactaactcaatggagcaacttcatgccattactgtgtacaataatgaagggttagttgaagctgaaccgaaactgaggcaagacaatatggaagataaaggtaaggttgatgtaagcaatggtacacagaagccggtaagtaaaaagtataaacatcgtgtgccataccccaatgcgaaaagaaaagaccacatagacgaacaatttcgtaaattccttaaattattaaaaaaattacatattaacttatcgtttattaaagctctttcgcagatgccaaacacagtgaaatttttaaaggaactcttggctaataaacgaaagttagatgatgcgtcgcatatggaattaaacgctgtttgctcaaccattctacagaataaactacccaacaagttgaaagatctagggagttttacgattccttatttaattggtagtttaaatattaagaatacgttggctgatctgggggtgagtattaatgtcatgccctataaaatgtttaaacaactaggtcttgggaaacccaaacaaactaggatgagcattcaattggcagataaaacaattagaattcctaggggtattgttcaatatgtgcttgttaaaattgataaatttatattcccagttgactttgttgttctagacatggatgaggatagtgacgtacctctaattttagaaaggccatttttagcaactgctagaacgatcattggcgttggcacaggtgaattgatacttcgtgtaggagataacacgtttaaacttcaagcttgtgattctgctaaaatatctagtaatcaagatgattgtttaaattctgttaatttgagtaacgttgcaactcaaccttcttttcaggagtcctctaggaagaacgtgatggagcctcattctaatccatgccacaaaaacagaacgactcatgaagaacgaaggcttcagatcgatgaactagacgaatggagaatacatgtcaaagagaaaccaaaagcacccgatgaatcaaagcgacgccatgatgagcgtagggatggaataaagcaatttaaggtcagggacaaagtattgttagatgaaaaggaccctagaattactactttagagttcaatacaaacagagaaactccttttacggtacttaatgttttctcatacggtacagttgaggtacatcattataaatttggcactttcaaggtaaacattactcgacttagactgtatgtggataatagaattgataataagaaagaggggtctcaactcctcaaaccaccatgaccataaaaatatgaggtaagtccagcttagactttaaataagcgcttctcgaaaggtaacccgagcactaacaccactaacccgtttattttatctatttttcgtatttttatgcaggaatagtgacctacatggcctggacacacgggcgtgtccttggtcgtatggaaacagggctaaaaaaatctccaagtatcgaaccacacagcctgcaatagtccacatgggcgtacgacacggccgtgtggaccacacggcttggacacataggagtgtcctaggccatgtgaaaactagagctaaatttttaaaattttaaacaagtcagagagttataggggtaaggcacacgggcgtgggaaaagcgaacaaagaagaacacggccatgcgacacggccatgtgaaccacacgacctagacacacgggcgtgtcccaaagccgtgtgacgaatggacattaaatcttcgcaacaaacttgggctgaacttgatctacacgggcatgtgacacgaccgtgtagcccaacacggggcctgaacatgaccgtgcccctttttaaacccttcaaacctaccactttcttcttcttcttctcaaaatttttttcctcaaaaccctagccgccgcagccccctcccccaccgtccagctacccctagctctccctcttcttcttttcttttcctccttccctatatcttcctttcattttcttttccttttcaacccctcatcacacccacaaccttaccccacagcgcgtcgcatgacccccttcaccatgctcgtgtccttttccgttcacaccagcaccatctaacgccggctgcaccaccaaccaccatcgtagttccctcttttacccttacctctattttatttctttatttccttggttatttgttagttttttagtccatttgcattggcccctacgtgactcgcctcgctcgacactttggcttcttcaacactctagagatgtcatcgacactcacactagtaggccagatgtctcctcaaagaatatctagcatggtccataggaggatgatagagcgacgccgtggatttgacccccctcagtacagaatcgttcagtctgatgactaggatgagccagatgacattactgatgatgtccctccccctcatgaggactcacccccaccaccaccaccgagtcaccgacttcctgctaccactctgacagttttatccgagcgattcacttgctctgagcagcagtactttgagcgattcgacagcatcgatgccactcttcgacagatttgccaccacctccacatctcttcttcggtaccgtcgacccacgaggcatccgatgatgaggacctttgagtccctttattttatcattgttattatttttattttactttcaattctattttatctcttatttatttttaaaaacttatgttttatattttgaaccatgtttatctttataatgattatcaagtgatcccttaattctcttcaacaatcgtgtctattttcttattagtaactcagaatcatgcctttcattcgactttcgctacaattcttgctttcgctcttccaaggatttcatccaaaatttcagggcagtttcacttctctccctctcttctgatattatgcttatattgctattatctatctttgtacattgaggacaatgtacatcttaagtgtggggaggttatttatgtgattattagaaaatccctgatttttttatcttgttctcaaataattttctcatatcattattaaagtgaatcttgattgatttatgatttttattgatatgttttgaattaaatcataggtaattgtgaattgattgtttgaactttaagacattaaagaatcaagcaagataagttgacttttaagaagttgctagattgtttccctgaattgaggtattatcttgaagttttgaattcataggattgacatcatatgcccataattattgtgagattttgagccttttagagcatatatctttcttgctcacttattttattggctatgagtgtcaacattgatttgctattctagaacttgcattgattatacatgtcgagaccatacctttgatttgatatactaaaatgataaaggcacttaggttctccacaaaaagtctacctacataattgacccctagtgaacctctttgagccttaactattatttcttgatttccccttaataataaccctcaccctaaccctttttgattcgttaaaaatttctcccttctcattgactccctttttattgagatttgatttggttagttacctaactatgttcgttcattccagttgctgaattatttcttaatatgtatttttcattcctgttcttattcttaaaaaaaaccgtatagtcatattcatccaattacatattgttcaaaagagcttggataagttaacgtcagtatattgagaaaaagctcacatctttagtttcgaatagttcaaattctggctttttttgtaattcagtgatttgattttatttttctaagtttggtaatttattaaattaatcccgagtctaaccctctcttgtaggctttatccacacctttaacccaatgcccattacaaccctgttaaagactttttgatttgtgtatcatttcattatagtggtggagatttgattttcattcaagcctatggtaataacttttcatgtttgactattgagtgcttaattattgaaccttaaacactttgagtgatttgagtgaatcattagtgaggatgtcaactttgtcaatttggaattaaagggtgattacctaaataaaggaggatacctatgatattatgattgaaatgctcaattttgattgtttgaaactttaatgttcttttagttaagcgcttaatgtattattacttttgaattatttcgaacattattgatgagaattataagttgagaaggatttattttaattgtgagtagaggattttgcttgaggacaagcaaatgcttaattgtggggatatttgataaaccataatttatacatatttttaccccaatgcttggcataattatggatgatttattataagatttagtgaatttgatgctcctaatcttttaatttcatgtgttatattcaggaaagcctaggaaagcaaaaatagcgagaaatgggcaacaaatggacaaattaggcctaaatcagtgtttcacacggcctaggcactttcatacggatgatccacatgcccgtgtgtaacacacggcagaccacacgcccgtgtgtcatggccgtgtcgacattaatccaagtcagaattgcacacggcctgagcacctttacatgggcgtggcacacgaccgtgtccctgttgagcccaagtctagttctactcagaaaaggctaattttgggctcttttgggcattcgaaattctatataaacacccgagaagaggattagggggatacaaagagttgaaggcagaaaatactcaaggacagccatcagaatcacctcagagacaagacctacatcaagactgaagaattccatccaatttcctagaagttctttgggtttctttatgttttgttgttttccaaactttgagatgttttccattattattatgaactaaactccctaaacacctaagggagataaaacctaagacgggtcttattattatttgagttatatgataaatacttgttcttattcttaattgtgaatttaactcttgctttaatattccaggatattaattcagttttttgatgtgcttattcagtagagcaaaagaccctgtttaagagtagatcattcataattaagcggagttgcatgcaatcctagagatagaacgacataaatctgccgaattagagtcaaatctaataagggaatccatagatcgagttaatgcgacaataggggttttaatcagaaagagattttgattaatcaacctagagtcagttgtttttagtctcgaaagggatattaacataaataaaggatttctacggattaagtcaagtgaataaatcgtctaattcaaaagtaataagtgaagtctaggtagattcttccttgggtattgttttctccattggttttctaaaaagtatttttcaaccttaatctctgtcgtaatcttagttaattagatagttagttttagataaaacattctcttaatttttaggctagtgatacgtgatattcatgaaaggttttaaaaatttataattaatcgttcttgaaactaactattatcacgatgaaggcaggtgtacctattgaacagtagtatagctttagcaagaccggattgtcgaatccaaaggaacaaagagtactagtaattactttatttttattatctagcctaaaaattaagggatttgtttatctaaactaattaattaaactaagggtgcacagagagaaaattggggaaaagcttttgggaaaactcgattgattaagacaatacccaaggaaaaatctgcctagacttcacttgttatttaactttgaatcagacgatttattcatttgacttgatctgtaacacccctatcccgtaaccgtcgccggaataggtaaggggcattaccggacttgtaactcatgtcagaacagtaaaattttgaactttttcttgaaataaagatcattcatttaaataagtactaagcacagccagggataaaatttaaactcctctaagtaaacattcaaaagatgccattttcgcatggcttatatacgttaaccaaaatatcctctcactactagtctattctatacatgccataagataatccaaaacgtagcagtaccaaacaatggatagtgatagtgtgactagttgctgatgatccccgagcctgtagcttccaaatgagatctataaaacagaggaaacaaagtacacggagtaagcattacaatgcttagtaagttttaagcagtgtcaacagataacaatcaaattataacatagttgttcgtatttttatttcactcttccttcgggcataccatccctttaccgaatatgcacatctcatcatatataataggcagataaattctcacttgatagtgacctcttatgatcataggtacattacatattttttttcctgactttccacattgaccaaatgcacaataatcatagaacagtcttattgctttactcacatgtgcatcacataacgaccttgtgatttagtctaaatcaaacttaaatataatctcaaaatacatacctgaccaacttaacgcattgaacgtatttattaccaattgttactgtgaagttgtataatcttacgctttacttgaatcttcagcaaaacctttagttcgaggcttacctggacaaaatctccacacgtagtcatcgggtctttagagctcggatatagtacgagcacgaagcttacggacattaatcagtgataatattctcgcataaagcctacggggttttaacccggatatagtactgacacaaatgcccttcgggacttatcacatttatacactttcacatccatcacgttggccactcggccctgtcacatatatacactttcacattcatcacatcggccattaggccttatcacatatatacactttcacattcatcacatcggccattaggccttatcacatatatacactttcacatttattcaaatatacttcacataccacatatactatcatgtacagacttggtcttggccgaatctacatccatcactttccaatgaataattcaattttacgccatactatcatttcatattcgaatactcataagcttacaatatcacgatttagaattcaagtatgggtttaatcaatagcttatgagcaactaaaacaagttttatccatgtttacaacaaaatcacatattcactatgagctgttttcctgagcaatggtcactaaattatttataaccggagctacaaaactccaaatcacttgccgttaatttttcctgaatatagactcgtatatcttccatccataaaatttccagaattttaggtttggccaatcaataccagatttttcctaaaatttcccctgtttcactgtttgactaatctgaccactcttcactacgaatcaaatttctcattttacagaattcaaaatgtgttgtatttgatttcatttgaaactagactcattaaggagtctaagcatataaattttatcttataaccatttttttacaatttataatgattttctaaaaacagaacaggggatttcggagtcattctgacaccgtctcacacaactttaaatatctctttataggaaatttctttgctcacaaggtctcttttataagaaactagactaattaagccttgattacatattttattcagcctataattccacaccaaaaatttatagtgattttctaaaatcacgttactgctgctgtccaaagcaaattattacaatttgctcttaaatttccaagtccaaacacatatgaacttaccatttgagtttaagacatatcatggtcacatcatatcttattaaatcaactcattatgtcctattatgattgaatttactcaatgtttaatcacttaaaacttaccttggatgttgtcgaacgatttcggcggctattcgatcactttttcctttcctttatccaactttggtcctctaagctcttgagctaattcaaacaaatttaacttattaaagtctcattatgctagcttatggccgaatatgacaatgaatttgagaggtcatatggccacctttagctcaaatacaaaatggtcatacgcatttttaatcacattaagcaatttagtacaattaatcaaacatttcctcatgtgcacctttatgaccaaatacacacatcattaacctaatatcaattaactaagcacttaacaaattctccttgagccgattgtctaagtcaagataggatcatcattatgcttacctatagccgaatgtacaacatcaatctatgcattcattcgtgtggccgaacatgcatgtctatgttgaggccgattgcatacttaatacattctacaagtatggtcacttgtattgaccaaataccattttgtttcaagttcaaaacttggctaatacacatatatgcactattaaaacatcctctccattccatcaattcaacacatgcattactcattaatatacaaaattatattcggccttagcacacctcttgctggccgaattttttttctccatctagcaacattttatgtactatgccgaaccaaaaagatcaaacacctagcttaatcatttccaaaacacttaaccggcctttgaccaagactttaaacaaagtctatgttcggctatcacacatatgggcattattagttcaaagttttaacaagattaatttctttgatcttaacctaaatgacaacccccattgttcatctagatttagcatgaaacaaacaccaaccaagaaaacaacacccatggccgagtatcatcttcatcacatagcaagatttaaaccataggctaggtagaactcaaactaacataaaaaatatgcatgaatctcatggaacaacatcaaacttaccttaacctagctacaagcatggctgaatctcttcaacatttcctcctcctaaacaccaaccaaccgaacatgaagcaagaaaatcctcttcttcttccttcctccttagaattttcggccaaaagaaatgttaaaggatggacactttttttttctttgttttcatcctactaacactaatattttattgcccatgccctttattttattaatccttacataatgcactaccccaacatgtttatgacatgtttttagccataacatcttgtccacccatgctcatggccggccactacatattagggggggaaaattgacatgcaagtcctcccttttgattacatgcactattaggtccttgtagattagcctatcacatttcaaaaatgtcacccataagtccttttgactaaattcacatgcaatttactaaatcgaagcctaaaactttcacaccttcataatcacatattttagacaataaatatcacattcaaataatttggtgactcggtttagcggtcctgaaaccgttttccgactagggtcactttaggggtgtcacatgatccgtagaatcccctaagttatattattatctctctcgagactaataacgtctaaccctaggttaattaattaaaatctctttctaactaacaccctagtgttgcattaactcgatctatggactcccttattaagtttcaccctaatctggcaaaatcttgtcaccctatctctaggcgtgcaatcaactccgcttaattacgacaaatttactcttagacagggactttttctcctctgaataagcacattatcttgaatcaatatcctggaatattaaaacaagaattaagaacacataattaagaacaagtcaaatatttatcatacaattcagataataataacaagatccgtcttaggtttcattccccttaggtatttaaggggtttagttcataattacgaaagaaaacatctcaaagagtaaatataacaaaacataaagaaaacccaaaactcctgaaggaaattgaagggagatattcagtcttgacgatgaatccgacttttgagatggatctatcggctttccttgagtaattccttgcctcctactctatgtccccccttctagtgcctcctcaggtgtttaaatatgctttagaattcctaagagccctcaagagtgcccttttccaaataggactatacttgggcttgatagggacacgctcgtgtatgattgcttcagaccgtggtcaaggctgttaaataggcacaagcatgtggtctacccgtgtgagtcgtacttcaattcttccaaatggacacgaccgtgtggactacccgtgtgaggaagtccaggccgtgttgatttctcatgttggcccattttctccgttttcgacccgtttctcattccttttactctcctgtgctcacctaagtataaaacatgaaattaaaggattaagagcatcgaattcatcaaatctagggagaaatcatccataaatgtactaagcatgaataaaaatatgtgtaaattacgctttatcaaataaccccacacttaagcgttttcttatcctcaagcaaaatcctcaactcacaatcaaaataaattcttctcaacttataatccctatcgataatatctcaaaataaaccataagtaatcatacattgagaattcaattagaagaacatcaaagtttcaaacattccaagttgagcattttatcacgaaagcataggtgtctcccctcatttaagtgattacctttgattcaaaatatcacaaagcttaacatcctcactaaagattcactcaaatcactcgaggtgttttaaggacaataaatgaagcactaattagtcaatatgaaacattattaccataggcttgcatgaaaatcaaatctccaccactatatattgagatgatatgtcaataaaaggtctttatagggttgtaacgtggctttggttagggggtgtggtcacaagtggaaagaaaatgttaaaatcgagatagaattgaaaaattaccaaactagaaaaataactaatcattaattgaatacaagtgagcctcaattaacacttaagctaaaaaaaacgatgaataactactaatatataagtatgtattgtattattattattattatttaagaacaagtcaaacaacataggctatctattaaaaataaaacatagctaagcaatttattcaaatcaaatctcgacaaaaataaggatcaaattaatttaggggatttcaacaataatgggttaagggttaatgttgagggtaaatcaatgaatgggttgtttggctcaagggggttcactaagggttaattgtgaaggtaggcttttatggagtgagtgggttaatgtaacagcccgatttagggccaaaatggaacagtggttttgaaaccacgcatccgagaatttattattttgattaagttttagtgtttatattatgattgcataatcgtgtgagaatttcattgcgaaattgtatcgattgggtgtttaatttgacgtttaggactaaattgaaataggtgaaaaatgtgtgtgttctagttcataaagtacttgattgaaatgggggttttaattagaggtccttaaatggtagttacaccattatactttatatggacaaaaatttggacatggatggaatttttagaaagtttagtagtaagggcattttggtcatttgcataataaatgaaataaaatgggaaaataacacaaaaatgtgttcatcctcatttaacttggctgaaacctgcatgttctccatagctagggtttgtttcaagctttcaagcttaatagtaagtgcattcaagccccgtttttaatgttttttacatttttaaaatcctcgtagctcggtttacctatttctaccattatttcgagttagggtttatgtttaaaaaattacccatgaatgatatgcatgtattttgatgttttatggtagaatatgaatgtttgaggttaggagaacgatcttttctaagcgatttttagcgaaaacgagcaaaacggtataatcggtaaaaatacctaatgctcataagtacatgttagagtgagaatttgatgttgttatagaagagaaaaatattcaaaatgtcataaaacataagaataagggctgaaattaaattttcgaccctaggggcaaaatcataattttgtaaaagttaggggcaaaaatataatttttacataatgtgatttttggattgaaataaatagtatgagtgttaaatgagctaaatgtgttgttatagatcaagaaaggcgtggaatcgacctcgaacgagggaaggaaaatgttttggactaaattgcaaaatttccatattttgcaccgaggtaagtttgtatgtaaataatacattaacttcatttaaatttttgtatttcagcctattttatatattttagttgattttaaatcataaaccgactattggaagaatggaaataagtaatagtgaaagaaatcccggttgaactttcggaaagattgaataatatagatgaaatgtagctaggtcacatgtatggtgctaagtgcacatcatgtgtacaagagagctacgagacactatgtagtagctaggtcacatgtgtgatacgggatgtatcccatgtagacaagagagctacgggagagggtaaatgtagctggtcgcttgtgtgattccaagtgatggacaccatgtagacaagagagctacgagataaattgcctaggtcacatgggtggtactaagtgttcaccatgtgtacaagagagccgaattatatgaaatatgatggtggagctgtgtgctgaaaccactaagtatcgaggattgatccgaattgttcaacgggatgattttatagtgacattgtaatcatgaacctacacttgtgatgtatgaaatgtggtgaaagtgaattgtgatatgtaggctaaatgaggtaaatacaaagaaagtgtgaaagagtgaattagcaataatactgttttggacggttacagtgacatgaatttgaaaaatcaccaaaaatagtaggaatttaattagacgctgaatgagatatgcatttaaagcttaatgagtctattttcatgtaaaagaaacaaagcaagtaaaggaactctataattagcgatatttataattgtgtgtgacttactcagaatgactatgtgatcccctgttcttaatttgaaaaatcattaaaacttttaaaaactaattaagaaatatagtttatatgtctagattccttattgagtctagttttaaatgaaatagatttcatggctatttgaattttttactgggagaacttcaattcgtagtgaatagaggtcagattaatcgagctatataacaggggaaactttaactaataaactgtactaattggttggacaaaacattctagaaaaaaattagtaaaaattaatatgagtctagtttcaggaaaattttacggaattgaatttcgagttttgtaactcgaattatgatttatttagtgaatatgacgcagtagagacagcttgaccgaagaggagcaaatggtgaaattaaaagtagataaacttgaattattgtgtaaacatattagattcttattcattatttacatacttgcttactaacctataagcttaccctcttttctttttttttgtcttatagtgtcgtccagcttgcacaggagtcaaggatcgttgaagatctacctgcactatcaatatttttgggaatttgaactaaacattttgaattatggcatgtatagtagacttagatattttgttacgtgtcataattgcctaggtcttaaaatattaagtatagtatttgaccgattattttgtttgaagcctttgaaattgtcaaatattattaaaggcatatgttataatgattcatgatctaattgtatgccatatttttttgttttgattttatttaatggtatgtattatgattcagtaatacctcgtaccccgttccggcgatggatacgggaaaggggtgttacatttagtggtatcagagctatggtttagtcggttctcggactaataaagtgtgtgtaaaagtctagctatacatgccataaatatactgtaataatgtggtgactcctgattattctaaactgtgttttattttaatatagtaatggatcttgacggaactgcggctgatgatgctgctagtaatgcgctggctcccgcacaagggactgcgcctgtagaaagtagacctgagacattgagacagggagatgaggctcaggatgcctttctccaaatgatgaaaaattggtatactgagtttattcgagcaaacccaaatgctcaacctcctccacctcctcccatacctcagacggttcttgtagctgctcatggcatagatttggtaagaatgaacaagcctccggttaacaagattcgaaaacaaggggccgaagagtttagagcaaaggtcgatgatgatctcgagaaggcggagttctggcttgaaaattctatccgtatatttgatgagctttcatgtacacccgaggagtgcttaaagtgtgctgtatcacttttgagagattcggcctaccattggtggaagactttggtagcagtggtgccaaaagaaaatgttacttgggatttcttccaggaagaattcagaaagaaatacataagtcaacgatttattgataaaaaacggaaggagttccttgaattgaagcagggcaagatgtctgtggcagagtatgaacgtgaatttgtaagacttagcaagtatggccaggaatgtgtgtccaccgaagctattatgtgcaagagatttgaggatgggctaaatgaggacattaaagtgcttgtgggaattttggagctgaaagaatttgtagtattggttgaccgagctcttaaagctgaagaattgaacaaagaaagaacaaaagctgctattgaggctcaagatgccagaaagaggccgataagcaagtcatttcaatctcaatcaaagaggtccaaagagacaaaccctcgaatgacagtttcagctggggattcacacagagatcgtggcagggcatattcggggtctaaagctcaagctactttagtgacaagtgtgggtaatgtgcggcctagaaagcccgaatgtcaacaatgtggcaggttacattatggtgagtgttgggaaaacgagcaaggttgtttcaggtgcggttttcgcgagtattttgttagagactgtccggagaaaggtaaagaagaaaaatttcagagtgctagacagagtactaccgctagcagaggtagaccaccgagaaatactggaagtggagctagcagtaaaactataatgaaagatttagcagcgagatcagaagctagagcgcctgctagagcttatgccatgcgtgcccgagaggatgcatcatctcctgatgtcattactggtacattttctctctatgatactattgttattgcattgattgatcccgggtctactcattcctatatttgtgtgaatttgatatctaataagaagttgcctgttgaatatactgagtttacgattaaagtgtcgaaccccttaggccaatatgtgcttgttgataaggtttgcaagaattgcccattaatgattcaaggtcactgtttttcggctaatctgatgctgttaccatttgatgagtttgacgttatcttaggaatggactggttgacattgtatgatgccaaggtaaattgtaaacagaaaacactagagttgaaatgtgaaaatggtgaaattctgtgggttgaaacagatgaatcaaataaattgcctatggtgatttcgtgcatgtctgctcagaaatacatgaggaaagggtgtgaagcttatttttcctatgtaatgaatactgagatgtcttaatagaaacttgaatcagtgccgataatctgtgaatttccagatgtattcccagaggaattgccagggttgcctccagatagagagatagagtttaccattgatttgttgccggggactgtaccgatctcgattactccatatagaatggctccaactgaattaaaagaattgaaggctcagttgcaagagttaacagacaagggatttgtgagaccgagtttctctccctggggtgctcctgtattgtttgtaaagaagaagaatggctcaatgagactttgtattgattaccgtcagctcaataaggtgactataaagaacaagtaccagttaccgaggattgatgatttattcgatcagttaaaaagggtaacagtgttttcaaagatcgatttgaggtccggttactaccagttgagagttaaggagtcggatgtgccgaaaactgcctataggacaaggtatggacattatgagtttcttgtgatgccttttggcttaacaaatgctccggctatatttatggacttgatgaatcgaatctttcggccatatttggataagtttgtagtagttttcatagatgacattctaatttattctcgggacgagtctgagcatgccgaacacttgagaaccatattgcagatcttgagagaaaagaaactgtttgctaagtttagtaaaagtgagttctggcttcgtgaagtcggattttgggggcatatagtttcaagtgatggtattcgggtggatccgaggaaaatttccgcgatcattgattggaaaccgccaaagaatgtatccgaggttagaagctttttaggcttagcctggtattatagacgttttgtcgagggattttcgatgattgcctttcctatgactaaattgctgcaaaagaatgttaagtttgaatcgactgataaatgtcagcagagttttgaaaagctgaaagcattatcgactgaagcaccaattttagtgcccgagccagggaaggagttcgtaatttatagtgatgcatcattgactggccttggatgtgtactgatgcaagagggtaaagtggtagcttatgcctcgagacagttaaagccgcatgagaagaactatcctacacatgatttggaattggccgctattgtctttgccttgaagatctggcgacattatttgtatggtgaaaaatgccgaatttttactgatcacaaaagtttgaagtatttgatgaatcaaaaggatttgaatctgcaacaacggagatggcttgaattattgaaggattatgagctagtgattgattatcatatgggaaaaccaaatgtagttgctgacgccttgagcaggaaatctctgtttactttgagagccatgaatacggagttagcattgtctaatgatgggtcaatcttagcagagatgagggctaaaccgttatttctccagctgatttgtgatgctcaaaagaacgatagtgagttgctaaccaagagaactcagtgcaaatcaggttacgactcagattttcgagttggacatgatgactatttgatgtttcgaggcaggatatgtgtaccgaaaaatgatgaattgattcagaaaatattacatgaggcgcataatggctgtttgtcagttcaccctggtagcacaaaaatgtataataatttaaagaagttatattggtggccatacgtgggaaccggaggaagccatgagaaagtagtacccaaacctttttaccggtaatattttcaaggacgaaaatccctaaaggggggagagttgtaacagcccgatttagggccaaaatagaatagtggttttaaaaccatgaatctgagaatttattattttgattaagttttagtgtttatattatgattgcataatcgtgtgagaatttcgttgcgaaattttatcgattgggtgtttaatttgacgtttaggactaaattgaaataggtgaaaaatgtgtgtgttctagttcataaagtacttgattgaaatgggggttttaattagaggtccttaaatggaaattagaccattatactttatatggacaaaaatttggacatggatggaattttttgaaagtttagtagtaagggcattttggtcatttgcataataaatgaaataaaatgggaaaataacacaaaaatgtgttcatcctcatttatcttggccgaaacttgcatgttatccatagctagggtgtttcaagctttcaagctcaatagtaagtgcattcaagccccatttttaatgttctttacatttttgaaatcctcgtagctcggtttacctatttctaccattatttcgagttagggtttatgtttaaaaatttacccatgaatgatatacatgtattttgatgttttatagtagaatatgaatgtttgaggttaggagaacgatcttttctaagcgatttttagcgaaagcgagcaaaacggtataatcggtaaaaatacctaatgctcataagtgcatgttagagtgagaatttgatgttgttatagaagagaaaaatgttcagcatgtcataaaacataagaataagggctgaaattaaatttccgagcctaggggaaaaatcgtaattttgtaaaagttagggggcaaaaatataatttttacataatgtgatttttggattgaattaaatagtatgagtgttaaatgagctaaatgtgttgttatagatcaagaaaggcatagaatcgacctcgaacgagggaaggaaaaggttttggactaaattgcaaaatttccatattttgcactgaggtaagtttgtatataaataatacattaacttcatttacatttttgaatttcagcctattttatatattttagttgattttaaatcataaaccgactattggaagaatggaaataagtaatagtgtgagatatctcggttgaactttcggaaagattgaataatatagatgaaatgtagctaggtcacatgtatggtgctaaatgcacatcaagtgtacaagagagctacgagacactatgtagtagctaggtctcatgtgtgatacgggatgtatcccatgtagacaagagagctacgggaaagggtaaatgtagctaggtcgcatgtctgattccaagtgaaggacaccatgtagacaagagagctacgagataaattgtctaggtcatctgggtggtactaagtgttcaccatgtgtacaagagagccgaattatatgaaataagatggtggagctgtgtgttgaaaccactaagtatcgaggattgattcgaattgttcaatgggatgattttatagtgacattgtaatcatgaacctacacttgtgatgtatgaaatgtggtgaaagtgaattgtgatatgtaggctaaatgaggtaaatacaaagaaagtgtgaaagagtgaattagcaataatactgttttggacggttgcagtgatgtgaatttgaaaaatcaccaaaaatattaagaatttaattagaggctgaatgagatatgcatctaaagcttaatgagtctattttcatgtaaaagaaacatagaaagtaaaggaactctataattttagatatttataattgtgtgtgacttgctcagaatgactatgtgatcccctgttcttactttgaaatatcattaaaaattatacaaaactaattaagaaatatagtttatatgtctagattccttactgagtctagttttaaatcaaacagatttcattactatttgaattttttactgggagaaattcaattcgtagtgaacagaggtcaaatcagtcgagctgtataacaggggaaaatttaactaataaactgtactaattggatggaccaaaaatcctagaaaaatattagtaaaaattaatatgagtctagtttcagaaaaattttacggaattaaattttgagttttgtaactcgagttatgatttatttattgagtatgacgcagtagagacagcttgaccgaagaggagcaaatggtgaaattaaaagtagatacacttgaattattgtgtaaacatattagattcttattcattatttacatacttgcttactaacctataagcttaccctcttttctctcttttgtcttataatgtcgtccagcttgcacaggagtcaaggatcgttgaagatctgcctgcactatcaatatttttgggtatttgaactaaacattttgaattatggcatgtatagtagacttagttattttgttacgtgtcataattttctaggtcttaaaatattaagtatagtatttgaccgattattttgttcgaagcctttgaaattggctaatattattaaaggcatatgttataatgattcatgatctaattgtatgccatatttttttgttttggttttatttaatggtatgtattatgattcggtaatacctcgtaccctgttccggcgacggatacgagtaaggggtgttacatttagtggtatcagaactacggtttagtcggttctcggactaataaagtgtgtgtaaaagtctagctatacatgccataaatatactgtgatagtgtggtgactcctgattattctaaactgtgttttattttaatatagtaatggatcctgacggaactacggctgatgatgctgctagtaatgtgccggctcccgcacaagggaccgcgcctgtagaaagtagacctgagacattgagactgtaacggcccaaatttcagtgatatcgaaacagtgatttgaaatcactaaatctgacatgtgagtttagatattagtaagtaaatgttaagtgtggttttagaaataattttgaattaaatgaaattatgtagtataggaagttgtagataaaacagaataaaaacgaggtatcgagacctcgaattcataaatcgagccataaatatttttaaaaatatttatggagtgtaaataagttagtgttaagttttcgttagaaaattttaacgtttggatagtcaattaattaaaaatgactaaattgaaaaaggtacaaaacttgataaaatgattaaatggctcaagtgttaaatgagggagggcttaaaaggcaaattagcctaaagggaatggatgaggcggcataagcaagaaaaaaatctggaatcaggtgaactaatggtaaaatggtaaattttacaaaattaaacaaataaattgaaattgaaagagatttctaggccattcttctcataatttcggccagacagccatgggagaaagcttttaagctggttttgcacaatttcactgcatgtgagtttatttcttgcccttttcttatattttttgtatttttaagacttttgcaattaggtgcaatcatctaattgatgggtgaaattggaagttaccctggctgagtaagggcagtatatgatgaattattaagaaattgaagttctaatttcatattaaggttgttttattaagtcattttgatagaaaatggtatttaggacctaattgtgaaaaagttgtgaattaaatgttagtgttgaaattcagaatatcaaaggttgtgaaataatttataatgataaaataaaatgttaattgagaaaaaaaattagttcaattgatgggtgaaatgagcagggactaaattgtaaaaactgtaaattttagggtaaaagtgcaatttcaaaatttgaacagcataaattgtgaagtgaaatagaagtcaaataaatgctaatgagtagaaatactttatattatagatcaagaatccaaagaagaacgagaaaaagaaaaagttgcgaaatagtccctaaatttcaatatcttctacaaatcagccaggtaagttcatatgtaaatgttggaaacatagttattattttaaatatttttaagttatttaaatgatatgataattgttatgaaatattatactcgtgataattgtttgataatatgtcaaattatgtaatatacttggaaaatgtggaatactactgagtatcgatatcagcattccgtaggagatagttgagacacatgattgggaaaaaggtcccgttgaaccttaggaatggattaggatacaagtgacatgccactaggatatttgggcatccgagctcgttgagttgagtccgagttcacttatggatgcgaatgtctgaactcgttgagttgagtctgagttcgagagatgtaactaggcatccgagctcattgagttgagtccgagttcacttatggatgcgaacgcccgagctcgttgagttgagtccgagttcgcttatgggcgggttacatggtagcttggctacatatgtggcacttatgtgcaaactttccatgtatccgaattatattccgatgtgttcaacgggtaaaattctactcaaatggaggaatactagagatgaaagggacgcattggtaagtgtcgtgaaatgaatactttgaacaggtttgtacttaaccctcgggttgaaaactcgacataacaacaatatggtaagattgtaaatgaaaatgtgatatgaatgtctcggtgatgattatgaaaacgatgttttatgtttgcttatatagttgtgttacttgctatttgcgtgtgaacttactaagcatttatgcttactccctccttttcattcattgtagttttgacaagccagctcggaaatcaggaacggtcggaggctcgctcacactatccgtgtatcatcttggtataacggtttgtatattttgagcatggcatgtatagcattataatcattttgtgtatatagtcttatgatatggttattgagtggtatggaaatggttgataatgattagctgttggaatggctaatcaaggacatatttggtgttatgtatgcctaaatgctagttattccatggaaatcatgaaataggtaaaatttaccataaaatagattaagacaacagcagtgacgtgagtttgaaaaatcattaaaaatagtagagatataattagatgatgaataaaatatggaattaaataattatgagcctattttcatatgaatggaacaaaacaggtatatgagttatattttatgagatgtttaaatttttgtgaaacagggctagagcgatttctggatcccctgttctgactttggaaattcaccataaattttacaaagataattagaagtcattctttatatgtacagattctttattgagcctagttttattagaaacaaacggcatagttattgaaactttgtacagggagatatcagattcataatacacagaggtcagagcagtcaaaccctgaaataggggataatttaactaataaactgtactaattggcctgaccaaaagttttagaaaaaattatttaatagatgtatgagtctattttaaggaaaaatttacggaattggatttcgagtttcagaactcgagatatgaatttttaagcatctgtgacgcagttggacagcttgtccgaatttgtttaagtgctcaaataagtttagtaatgcctcgtgctcaactccggcgacggtctcgggtaagggggcgttacatttagtggtatcagagcaggtttagttggttctcggactaacttagcatgtgtaaaagtttagctatacatgccactgatctgtgatagtgtgatgtcttccaacgcgtataagtaccgtcttatttagacagggtacttttttgtactctctaaccgagctgcgctgaccatgttcaatgttatgtgaaggtatttgagtaaagttatgattatgataagtctcggttcagaaaagtatgaataaaaatttatgatacatatgtgataatatgtgagatgaaagttcatattgtaataaatatccatatttgcttaatgctcatatgatgtagtgtatgtggcttacttgataagatgaacggaataaatagaaagtaatagaggtatgaataaaggtcataatatcatgatacgaatgaaaatgtcattgtctcgattagacgttgaatgttaatgatatatattttatgagataaaggattataatgaaatgaacttatctatgttaaattattggactgaattatatgattgtaatgatatgtacatgatgatgcacgaaatgaaagttgtgattgtgatgcaaatatctatgtttgtttggccttaataagatgtcatgagcatgaattaatttaattaaataaataaataagtaaagctatctagaaaacataaaatgtatgcataagtatattgtctaaatgggacaataggaaaatttgtgtaagccaacatgaatgttgcattgcctgaatgaatgacatgattttatgatgttgctatgatgatggaagttgtgtcatatgtgatgtataagaaagtcgagtcagaggtcctacaacccctcccccttaccaaagtggtacttataatggaatttcatgagatttgtattgaataagttttcggttgagaacccaaagagttcagtgatagaataattataagtatgatcaaagattgaaaatgagctgataagtaaagtcagagccagtaaagtatcggattgatataaagattattggaattatgcactgtcccagttagagaaggaattctctttggtaaatcgaattactcaggtgcaaagtcgagaaaagtgtaaatcaaaatttattcagaactggccttctttagtgaatggtttaatatgaaatttgtgacggcagaactagttagggaaatgatatttgaaatgtgaactatctgagtgtgatagttatgactggacagatttagcagtctcttttgagatgttctatgtgtttacccgttctcagaaatatttctatggctattgatcttctgaagaaattcttgttatatgggaatgtcttttaatcctggtgttggatgaaagcattggtagtctgactgggttataatttatattgctctatttcatcgggtattctatttcatttcgactgataagaattgatgagagaatacgtatgatattatgattctgtttcttctacttgatgcttcatgtgatatatatgtatgggaagatatattgttcatgttatacttgattccagtgggattaaatgatgttttcttttggactttctttctttgaagaattatcggggtattctgtattttctctatgagtttggtttttgattctctggcatagtatcgtatcttgggtttctttatcctggatctctttattctgggtttctctatcttggatttctttattcggttttcttgttatctttgttccataatttgtcaattatgactcatgttcgaagtacgttcttcagctcgtgataatcatgtcaaatatgactatacttctaatttggtcttggtaatgtggtgattttagtattgggattttttctaatttctgtgtaaggatttgacatcagtaaaggcataggtgataaaagcgcgagtttcagttggtatggtgaattatttatttgaaagatttcatgtgacaattatgtcaggattatttttctcgagtttgataatagaatttcatttttgtactaataaaagagtaaatagtctgaacgagaagtgtatatttattagaaagagttggatattagttaaagtcactacgaatgataaggttttcgtcttgtgaaagctgaaaagtttattacatgttgacagagttcggatagatgagaatattggtaaccgaagcgtctgaactaaactagtctacattgagcaaagacttcctgactttcagtaatatactgttgtatgaattgtgatgtgtttcaagacagtaaggtaatgtgatagtttagagcattcgatgttacataaaatctgagttgttaaaagggttaaagccgagcattgggatctatcaaaattatccttgccaatgttgatattgggatggaaatgagaaggattattcttgagaccatatcagaattatttctatgacgaaaagaggaaaatgtgatgtatcctattcttaaaggtttggcgagatctataaatcatatcggtattgaatgaattcctactcatcaaattcatggaatttcagatctctttgattgttggatttcttggaattccgatcttcattaaatcaagatgagatacgggttttatgtcatgatatcatggaaaactgagaagggttgaaaattaaagaacaattaagagatgagtccgtaagctttcagaatatatgagaaattaaagagatatattggaggcactgcctgagtgaaagttcttcagcatcgaatatgaaattgaggaatttaagtgaagaccacttttccagtaagattctcggggacgaaaatccctaaaggggggagagttgtaacggcccaaatttaagtgatatcggaacagtgatttgaaatcactaaatctgacatgtgagtttagatattagtaagtaaatgttaagtgtggttttagaaataattttgaattaaatgaaattatgtagtataggaagttgtagataaaacagaataaaaacgaggtatcgagacctcgaattcataaatcaagccataaatatttttaaaaatatttatggagtgtaaataagttagtattaagttttcgttagaaaattttagcgtttggatagtcaattaattaaaaatgactaaattgaaaaaggtacaaaacttgataaaatgattaaatggctcaagtgttaaatgagggaggacttaaaaggcaaattagcctaaagggaatggatgaggcggcataagcaagaaaaaaatctggaatcaggtgaactaatggtaaaatggtaaattttacaaaattaaacgaataaattgaaattgaaagagatttctaggccattcttctcataatttcggccaaacagccatgggagaaagcttttaagctagttttgcacaatttcacttcatgtgagtttatttcttgcccttttcttatatttttgtatttttaagacttttgcaattaggttcaatcatctaattcattagtttttgatttggtgggtgaaattggaagttaccctggctgagtaagggcagtatatgatgaattattaagaaattgaagttctaatttcatattaaggttgttttattaagtcattttgatagaaaatggtatttaggacctaattgtgaaaaagttgtgaattaaatgttagtgttgaaattcagaatatcaaaggttgtgaaataatttataatgataaaataaaatgttaattgagaaaaaaaattagttcaattgatgggtgaaatgagcaagaactaaattgtaaaaattgtaaattttagggtaaaagtgtaattttgaaaattgaacagcataaattgtgaagtgaaatagaagtcaaataaatgctaacgagtagaaatactttatattatagatcaagaatccaaagaagaacgagaaaaagaaaaagttacggaatagtccctaaatttcaatatcttctacaaatcagccaggtaagttcatatgtaaatgttgataacatagttattattttaaatatttttatgttatttaaatggtatgataattattatgaaatattatactcgtgataattgtttgataatatgtcaaattatgtgatatacttggaaaatgtgaaatactaccgagtatcggtatcagcattccgtaggagatagttgagacacatgattgggaaaaaggtccggttgaacttaggaatggattaggatacaagtgacatgtcactaggatatttgggcatccgagctcgttgagttgagtccgagttcacttatggatgcgaatgtccgaactcgttgagttgagtccgagttcgagagatgtaactaggcatccgagctcgttgagttgagtccgagttcacttatggacgggttacatggtagcttggctacatatgtggcacttatgtgcaaactttccatgtattcgaattatattccgatgtgttcaacgggtaaaattctactcaaatggaggaatactagagataaaagggatgtattggtaagtgtcgtgaaatgaatactttgaacaggtttgtacttaaccctcgggttgaaaactcgacataacaacaatatggtaagattgtaaatgaaaatgtgatatgaatgtctcggtgatgattatgaaaacgatgttttatgtttgcttatatagttgtgttacttgctatttgcatgtgaacttactaagcatttatgcttactccctccttttcattccttgtagttttgacaagccagctcgaaaatcaggaacggtcggaggctcgctcacactatctgtgtatcatcttggtataacggtttgtatattttgagcatggcatgtatagcattataatcattttgtgtatatagtcttatgatatggttattgagtggtatggaaatgcttgataatgattagctgttggaatggctaatcaaggacatatttggtgttatgtatgcctaaatgctagttattccatggaaattatgaaataggtaaaatttaccataaaatagattaagacaacatcagtgatgtgagtttgaaaaatcattaaaaatagtagagataaaattagatgatgaataaaatatggaattaaataattatgagtctattttcatatgaatggaacaaaacaggtatatgagttatattttatgagatgtttaaatttttgtgaaatagggctagagcgatttctggatcccctattctgaatttggaaattcaccataaattttacaaagataattagaagtcattctttgtatgtacaaattccttattgagtctagttttattagaaacaaacagtatagtcattgaaactctatacagggagatatctagtttaaggaaaaatttacagaattgaattttgagtttcataactcgagatatgaatttttaaacaactgtgatgcagttggacaggttgtccgaatttgtttaagtgctcagataagtttagtaatgcctcgtgctcgactccggcgatggtctcgggtaagggggcgttacagagacagggagatgaggctcgggatgcctttctccaaatgatgaacaattggtatactgagtttattcgagcaaacccaaatgctcaacctcctccaccccctcccatacctcagacggttcctgtagctgctcaaggcatagatttggtaagaatgaacaagcctccggttgacaagattcaaaaacaaggggccgaagagtttagagcaaagatcgatgatgatcccgagaaggcggagttttggcttgaaaatctatgcatgtatttgatgagctttcatgtacacccgaggagtgcttaaagtgtgctgtatcactttcgagagattcggcctaccattggtggaagactttggtagcagtggtgccaaaagaaaaggttacttgggatttcttccaggaagaattcagaaataaatacataagtcaacgatttattgataaaaaacggaaggagttccttgaattgaagcagggcaagatgtctgtggcagagtatgaacgcgaatttgtaagactcagcaagtatgcccaggaatgtgtgtccaccaaagctattatgtgcaagagatttgaggatgggctaaatgaggacattaaagtgcttgtgggaattttggagctgaaagaatttgtagtattggttgaccgagctcttaaagctgaagaattgaacaaagaaagaagaaaagctgctattgaggctcgagatgccagaaagtggccgataagcaagtcatttcaatctcaatcaaagaggtccaaagagacaaaccctcgaatgacagtttcagctggagattcacacagagagcgtggcaaggcatattcggggtcttaagctcaagctacttcagtggcaagtgtgggtaatgtgcggcctagaaagcccgaatgtcaacaatgtggcaggcaacattatggtgagtgttgggaaaacgagcgtgcttgtttcaggtgcggttctcgcgagcattttgtcagagactgtccggagaaaggtaaagaagaaaattttcaaagtgctagacagagtactaccgctagcagaggtagaccaccgagaaatactggaagtggagctagcagtaaaactgtaatgaaagattcagcggcgagatcagaagctagagcgcctgctagagcttatgccatacgtgcccgagaggatgcatcatctcttgatgtcattactggtacattttctctctatgatactattgttattgcattgattgatcccgggtctactcattcctatatttgtgtgaatttgatatctaataagaagttgcctgttgaatatattgagtttacgattaaagtgtcgaaccccttaggacaatatgtgctagttgataatgtttgcaagaattgcccattaatgattcaaggtcactgttttccggctaatctgatgttgttaccatttgatgagtttgacgttatcttgggaatggactggttgacattgtatgatgccaaggtaaattgtaaacaaaaaacactagagttgaaatgtgaaaatggtgaaattctgtgggttgaaacagatgaatcaaataaattacctatggtgatttcgtgcatgtctgctcagaaatacatgaggaaagggtgtgaagcttatcttacctatgtaatgaatactgagatgtctgaattgaaacttgaattagtgccgataatctgtgaatttccagatgttgcctccagataaagagatagagtttgccattgatttgttgccggggactgtaccgatctcgattactccatatagaatggctccgactgaattaaaagaattaaaggctcagttgcaagagttaacagacaagggatttgtgagaccgagtttctctccctggggtgctcctgtattgtttgtaaagaagaatgatggctcaatgagactttgcattgattaccgttagctcaataaggtgactataaagaacaagtacccgttactgaggattgatgatttattcgatcagttaaaaagggcaacagtgttttcaaagatcgatttgaggtccggttactaccagttgagagttaaggagtcggatgtgccgaaaactgcctttaggacaaggtatagacattatgagtttcttgtgatgccttttggcttaacaaatgttccggctatatttatggacttgatgaatcgaatctttaggccatatttggataagtttatagtagttttcatagatgacattctaatttattctcgagatgagtctgagcatgccgaacacttgagaaccatattgcagatcttgagagaaaagaaactgtttgctaagtttagtaaaagtgagttctggcttcgtgaagtcagatttttggggcatatagtttcaggtgatggtattcgggtggatccgagcaaaatttccgtgatcgttgatttgaaaccgccaaagaatgtatccgaggttagaagctttttaggcttagcctggtactatagacattttgtcgagggattttcgatgattgcctctcctatgactaaattgctgcaaaagaatgttaagtttgaatggactgataaatgtcagcagagttttgaaaagctgaaagcattatcaactgaagcaccaattttagcgcccgagccagggaatgagttcgtaatttatagtgatgcatcattgactggccttggatgtgtactgatgcaagagggtaaagtggtagcttatgcctcgagacagttaaagccgcatgagaagaactatcctacacatgatttggaattggccgctattgtctttgccttgaagatctggcaacattatttgtatggtcaaaaatgctgaagttttactgatcacaaaagtttgaagtattagatgaatcaaaaggatttgaatctgcgacaacggagatggcttgaattattgaaggattatgagctagtgattgattattatccgggaaaagcaaatgtagttgctgacgccttgagcaggaaatctttgtttactttgagagccatgaatacagagttagcattgtctgatgatgggtcaatcttagcagagatgagggctaaaccgttatttcttcagctgatttgtgatgctcaaaagaacgatagtgagttgcaaaccaagagaactcagtgcgaatcaggttacgactcagattttcgagttggaccagatgactgtttgatgtttcgagtcaggacatgtgtaccgaaaaatgatgaattgatacagaaaatattacatgaggcgcataatggctgtttgtcagttcaccctggtagcacaaaaatgtataataatttaaagaagttatattggtggccatacatgaaaagggacatttctgaatttgtaactaagtgtttgatctgtcaacaagtaaaagctgaacatcaagtgccttcaggattactccaaccggtaatggtgcctgagtggaaatgggataggattaccatggattttgtaaccggtttgccactaactcctagaaagaaggatgctgtctgggtagtagttgataggttaacaaagtcggctcactttatactggtacgtaccgattacttacttgataaattagctgaattatatattgctgaaattgtgaggttgcacggggtacctatgtctataatatcagatagagatctgaggtttacctcgagattctggaaaaagttacaagaagctttgggcacaaaattaaactttagtaccgcgtttcatccataaacagatggtcagtcgaaaagagtaatccaagtactcgaagatatgcttagatgctgtgttttagaatttgaaggcagttgggagaaatatctacctttggttgaatttgcctacaataacagttttcagtcgagtatacagatggcaccatacgaagccttgtatggtcgcaagtgtcgaactcctttatattggaccgaccttagtgagtaacagattcatggggttgatctagttaaagaaaccgaagagaaagtaaaagtaatttgggattgcttgaaagctgcttcagatcgacaaaagtcatatgcagatttaaaaagaaaagagattgaatttcatgtgggtgataaagtgttcttgaaggtgtcaccatggaaaaagattctgagatttggccgaaaaggcaagttgagtccgcgttttattgggccgtacgagattattgagaggattggaccagtggcatatcggttggcattaccagtagaattagaaagaattcataacgtgtttcatgtatcaatgttgtgatgttatcgttctgatctttcacatgtgatttctccaacagaaattgatattcgttcggacttgacctatgatgaggaaccgattaagattttggctcgagaagtaaaacagttgagaaagaaaagtatagctttagtgaaagtgttatggaaaagacatggagtagaagaagctacgtgggaaccggaggaagccatgagaaaatagtacccaaacctttttaccggtaagattttcagggacgaaaatccctaaaggggggagagttgtaacagcccgatttagggccaaaatagaacagtggtttcaaaaccatgaatctgagaatttattattttgattaagttttagtgtttatattatgattgcataatcgtgtgagaatttcgttgcgaaattttatcgattgggtgtttaatttgacgtttaggactaaattgaaataggtgaaaaatgtgagttctagttcataaagtacttgactgaaatgggggttttaattagatgtccttaaatggcaattagactattatactttatatggacaaaaatttggacatgaatggaatttttagaaagtttagtagtaagggcattttggtcatttgcataataaatgaaataaaatgggaaaaataacacaaaaatatgttcatcctcatttaacttggccgaaacttgcatgttctccatagctagggtttgtttcaagctttcaagctcaatagtaagtgcattcaagccccgtttttaatgttctttacatttttgaaatcctcgtagctcggtttacctatttctaccattatttcgagttagggtttatgtttaaaaatttacccatgaatgatatgcatgtattttgatgttttatggtggaatataaatgtttgaggttaggagaacgatcttttctaagcgatttttagcaaaagcgagcaaaacggtataatcggtaaaaatacctaatgctcataagtgcatgttagagtgagaatttgatgttgttataaaagagaaaaatgttcagtatgtcataaaacataagaataagggttgaaattaaatttccgagcctaggggcaaaatcataatttgtaaaagttagggggcaaaaagtaatttttacataatgtgatttttggattgaaataaatagtatgagtgttaaatgagataaatgtgttattatagatcaagaaaggcgtggaatcaacctcgaacgagggaaggaaaatgttttggactaaattgcaaaatttccatattttgcaccgaggtaagtttgtatgtaaataatacattaacttcatttacattttttttatttcagcctattttatatattttagatgattttaaattataaactgactattggaagaatggaaataagtaatagtgagagaaatcccggttgaactttcgaaaagattgaataatatagatgaaatgtagttaggtcacgtgtatggtgctaagtgcacatcatgtgtacaagagagctacgagacactatgtagtagctaggtcacatgtgtgatacgggatgtatcccatgtagacaagagagctacgggagagggtaaatgtagctagttcgcatgtgtgattccaagtgaaggacaccatgtagacaagagagctacgagataaattggctaggtcacatgggtggtactaagtgttcaccacgtgtacaagagagccgaattatatgaaatatgatggtggagctgtgtgctgaaaccactaagtatcgaggattgatccgaattgttcaacgggatgattttatagtgacattgtaatcatgaacctacacttgtgatgtatgaaatgtggtgaaagtgaattgtgatatgtaggctaaatggggtaaatacaaagaaaatgtgaaagagtgaattagcagtaatactgttttggacggttgcagtgacgtgaatttgaaaaatcaccaaaaatagtaggaatttaattagaggctgaatgagtatgaatctaaagcttaatgagtctattttcatgtaaaagaaacagagcaagtaaaggaactctataatttgagatatttataattgtgtgtgacttgcttagaattactatgtaatcccctgttcttactttgaaaaatcattaaaaattgtacaaaactaattaagaaatatagtttatatgtctagattccttattgagtctagttttaaataaaatagattccatggctatttgaattttttactgggagaaattcaattcgtagtgaacataggtcagatcagtcgagctgtataacaggggaaactttaactaataaactgtactaattggcttgaccaaaaattctagaaaaaaattagtaaaaattaatatgagtctagtttcaggaaaatgtgacagaattgaatttcaagttttgtaactcgagttatgatttatttaatgagtatgacgtagtagagacaacttgaccaaagaggagcaaatggtgaaattaaaagtagatacacttgaattattgtgtaaacatattagattcttattcattatttacatacttgcttactaagctataaccttaccctcttttctctcttttgtcttataatgtcgtccagcttgcacaggagtcaaggatcgttgaagatctgcctgcactatcaatatttttgggtatttgaactaaacattttgaattatggcatgtatagtagactttgttattttgttacgtgtcataattgtctaggtcttaaaatattaagtatagtatttgaccgattattttgttcgaagcctttgaaattggctaatattattaaaggcatatgttataattattcatgatctaattatatgccatattttgttgttttggttttatttaatggtatgtattatgattcggtaatacctcgtaccctgttccggtgacggatacgggtaaggggtgttacagttaaacctaagttcctttatcatctctacatatcaaatcaaatgatgtggtcttgacatgcataattaagcaagttctagaatgacaattcaatattgacgcactcaaagcaacaataagagtgagcatgaaagaaataattgatgctctaaaggctcaagatctcacaaaaattatggttttttgatgtttaaacctgtgaatttcaactcaagataatacctaaacttggggaaacaacctaaaaatttttacttctcaaaaatcaactttatcatgcttgattctctaattccttaaagtttgaataatcaatgcataaatgcctatgttttaattcaagacatattaaaagaaaatcataaatcaatcaaaattcattctaataatgatatgagaagatcaaatgagaataagacagaattcagggatttttctgataatgatataaaagaccccccacacttaagatgtacattaccctcaatgtacaaagttagatttacgacggtataaatataagaccataagatagggagagaattgaaacttcctgaatgatgaatggactccttcatttggagttatggagaataatcggccaaggcaatgatgagattggaggaggatactccggtggtggtaaaggttggttccacaaccatattgtccagcaaagaagttatcatggtagtcgggcaggacatggtagtcgtggagaaccttttccagctttggagctctttataactatgatagaatcaggaacttctcttaggaaatataaagaaacataattactcgtaaagaaatggccaaataaaaattataaaatctcaagataaaataaaaatagaattaaaggaaaataaaaagtaatttcaacatataaataaatataaaattaaaaaaataaaaataataggtgtttataaagaaattggggcacacggccgcgaggcacgcccgtgtgccctcattccagcccgtacgtttcgtggttttcaaaattgggtgcattggtgcacacggccatgttgcacgtccgtgtcattcttcgttcgctgatcccacgcccgtgttgttttgacaaggtcgaccacggtcggcgagcacgggcgtgttgcacgtccgtgttaatttggcaggattgcccacggctatgtcgcacgaccatggcaacttatcgaatcccgtgttagagaaacgtttctgttctattttcacacgaccgtatcgcacggccgtgttgcctcccgtggtataggcactgcctaaggcatgtccgtgtggttctgaaaatcctgtgttcagtgactcggttagtgaattaaatgttaaaaactaaaatttaaagaagtcaatactgttagtgctcgggtttcctcccgagaagcatttatttagagtctaagctcaacttacttctctttgcatggtcatggtggttcaaggagtttacacttctcatccctgctatcagtttcttcagaataaggttttagacgagtattatttaccttgaatgtaccaaatttgggatgaattacctcgactgtgccgtatgggaaaatgctaagtacggtaagagggatttctccattaggttcagaggtggcaatccgagggtctactgcatctagtagtactttgtctccaactttgagttgatttggtgagatattgaactcgtcatggtgtggttttggtttatcgtgtgttttcgatttatgtgtccaccattcatctagttcctcaactcgtagctttcgttcttcatagataggtcccttgtcgtcactcgaacaaggctcatgtgcgctcttcgaacctgttttctgcacagagggttttaccatatgatcgatattagtagtacgatttatacaatcaccctcaatttttgatgtgttactcgaattacgagcttgaagggtgattgtttcgtctcccacacgaagtgtgagttcacttgtgccaatatcaattattgttctagcagttgctaaaaagggcctccctaaaattaaaggaacattactatcctcctttatgtctagaacaacgaaatcaactgggaatataaatttcaataataccactaggaaatttgattgttttatcggctaattgaatactcatcctagtttgtttgggtttcccaagacctagttgcttaaacattttgtaaggcatgacattgatactagcccttaaatcagccaaagcattattaacatctaagctaccaattaaacaaggaatcgtaaaacttcctagaccttttaatttgttggttagcttattctgtagtatggctgagcaaacagcatttagcctcatccaacttctgcttatttgttaaaagctcctttaaaaatttgactccatttggcatctgcaaaagagtttcaataaacggtaagttaatatgtaatttctttaataatttaagaaattttctaaattatgtgtctgtgcgttctttccttatcgcattagggtatggcacacgaggtttgtactctttacttaccggtgtttgttcactgtggtctacctcaactttgcttttacttaccacgattccttgccttggttttggttcaggttccactaacccttccttgtcttggatggtaattgcgttgagttgttcccttgggttagatttagtgttactcggcaggctaccttgtggtcgttcagatattaatttggcgagctgtcctatctgagtttcgagcctttagatcgacgcttgttgattcttaagtgctgtctcagtattctaaaaacgagtttctaacaccgagatgaattttgttagcattacctcaaggttcggctttttctcttgttggtaaggtagttgttggaagcctgaaggcagtggtgtctaattcccttggcctctccatgagaaatttgggtggttcctccaacctgcattgtaagtgttactataaggattattttgagatcaaggattattacccatgtaatttaactgctcattctctatgttgtggccatagggtgggtattctgaattgcttgaccacctccacttgcttcgtactgcattattgggtgaacctatgaagaacaaagaaaaccgtcaattttcctattcaaaagttctacctgattagagagcatggtgaccaaatcgacgttaaaaataccgactgttttcattggctttgtcctcatgacttgtcattaataattattcagtgccatctcttctataaattcataagcatcctcaggtgtcttattattgatagttccaccaacagctgcgtcaatcatctgtctagtcgaaggattcaagccattgtgaaacgtttgaacctgtagccagagtggtaacccatggtaagggcatcttctcaaaaggtcattgtatctctcccaatgcatcgtagagtgtttctaaatccatctgcacaaaagaaaagaaattattatgtaatttagctgttttagccagcagaaaatattttaataaaaacttttcgttcatttgttcccaagtagtgattgaccctcgtggtaacgagttcaaccactgtttagctttattcctcaatgaaaagggaaataaccgaaaatgaatggcatcatcagaaacgccattgattttaaatgtattgcaaaactccagaaaattcgccaagtgagcgttgggatcctcgtcctgcaaaccatcaaactgaaaaaattgctgtatcatttgaattgtgttaggtttcagttcaaaattatttgcaacaacagcaggcctaactatgcttgattcagttcctattaaagaaggtttagcataatcatacatagtatgcggagcaggattctgattagtagcaatcgcaggaggtagcagattttcctggtttttagctatctcctcggttgtggtgtgaatatcgtcctcttactcttcctctgtgtatcttaagtttcgccttatttctcttcggtttctgcaaactgtgcgatcgatctcactatcgaaaaacctgtcaaaagaaaataaaataaaaattagaaaagtgaaattaaactaaaaataaattacactaaaagtaaatatggctaaagtaataaaaatcgaatgttcctaatatcttagttccccgaaaacggcaccaaaaacttgatacgtgatattcgtgacaggttttaaaaatttataattaatcgttcttgaaactaactattatcacgatgaaggcaagtgtacctatcgaacaatagtataactttagcaagaccggattgtcgaacccaaaggaacaaagagtactagcaattactttaaaaattaaggaatttgtttatttaaactaattaattaaactaaggatgcacagagagaaaattggggaaaagcttttggggaaactcgattgattaagacaatacccaaggaaaaatctgcctagacttcacttgttatttaactctgaattatacgacttattcatttgacttgctccatagaaatccctaagttatattattatctctctcgagactaataacgtctaaccctaggttaattaattgaaatctctttctaattaacatcctagtgttgcattaactcgatctatgaactcccttattaagtttcatcctaatccggcaaaatcttgtcaccctatccctaggcgtgcaatcaactctgcttaattatgacaaatttacttttaggcagggacttttgctcctctgaataaacgcattatcttgaatcaatatcctggaatattaaaacaagaattaagaacacataattatgaacaagtcaaatattcattatacaattcagataataataacaagatccgtcttaggtttcattccccttaggtatttagggggtttagtttataattacgaaagaaaacatctcaaaagagtaaagataacaaaacataaagaaaacccaaaactcctgcagaaaattgaagggagatcttcagtcttgacgatgaatccggcttctgagatggatcaatcagttttccttgagtaattccttgcctcctacttcgtgtccccccttctagtgcctcatcaggtatttaaatatgcgttagaatgcctaagagccctcaagagtgcctttttccaaataggactatatttgggctcgatagggacacgcctgtgtgcgattgcttcagaccgtggtcaaggttgttaaataggcacggacgtgtggtttacccgtatgagtcgtacttcgattgtgccaaatggacatgaccgtgtggactacccgtgtgaggaagtccaacccgtgttgatttttcatgttgcccattttctctatttttggcccgtttctcgttctttttactctcctgtgctcagctaactataaaacatgaaattaaaggattaggagcatcaaattcatcaaatctaaggagaaatcatccataaatgtgctaagcatgggataaaaatatgtataaattacagtttatcagctagataataaaaagatagtaattactagtacttttagtcttcgtggatacgatattttaggtctcaccataactatactactgttcgataggtgcacttgccttaaattgaatttttagttagtttcacgaccatcaaccattgaagcacattgacatagaagtggtgatgcatgatgatggttaaaaagggcttcattggttgcaattgaactacatgataagcctttagaatgaacatcttaactctaagtgttgttttcaagctccaattactcttccaccacatcatatcactacaaccttcattctctacttgagaagtgttgttggtaagaaaaagataacccgacttcacacaatagctttttaaagttttaaaagatatttctaaacaatcttgagcagtgccagaagcagtgctacagattagtgccaactgcattaggcactaagtatgaacaaggcagaaaaataatttatagaatatatatatcaattcggtttttcaactttcatggggtattgtccaaagagataatcagaatccatatattagcaactcgtaaaacaaatgattacaacttctaacactcatcaggttagatttctcgcatttgcacctaaaatctagataactctcctctatgttttagaaaacttagtacattaaccaagtaacaattagttttcacttaatgcactcacaataaacggtccttaatgaaccaaaataagtgctcttaactcagtacaatatctacataagtctcattaatttttaaggaattgagacttactaacatagtatctcaattacaatcaatctccccatataaccaacaagattacaagcataaagaatatcttcaatgagctctgataagtcttgaatcttcaagatatacttcctagttttaccctattcaatgcgattctatcgaattcggaaagtcgattgccttgatccaaatccaaacaatcttgaaaatatgttgttataagtaatttggataccaaagatgggcttatagtcgtgcaaagtaccaactagaatcaaagttcaaagatttttgttaccaaaatttgtcaactttggcaagcttctgaccttgtagtgctagacagcaataggcagtggtccttgacactactaagaaactatctcaacagttccatcatgtgagaaatttcaaaataaatcttttcccttttgatttcaacccattactctttgaaagcaagtaaatgaatcaaacaggtctaaagcaaaataaatggaacaaactctaaagagccaaacctaaagaggaattataagtattagttgaatatgaatcttatagtacctcactcatatattattctttgacctaaacctcatttattctttctctcttttcactattattatttaatattttttatgggttactatttggtacgttgctagtgtatttttttattccacaaacaatcttaaaaattgtcatgtgtcctttttttaaaatatattttttaatattttactatacccttataaaacacttgtcaaccccctttgactctaactgtaaagtctaacaactccattatcaatgtcaatgttattatgctaatttcttttacgtatttttaaaaataattttatgtatttttaatttattatatttaaaaatagattttttttgtatttttgaatttttaaaataaattctaatttttttagaatcaatatcaaattgacacaatatatttataaagcttattttttaaaaaagaattagaattaaactgacataacatataaatgatgatggttaaatttaatattgttttaattagaaaagggttatgttatccttcggttagctattcaacacctagatgactaaaaaaacatcatcttaaatagttggatgacttaattgtaattttttaaaattaaataactaaaataaaaacttaaatataattaaatgactagtaatataatttactctttgaaaaaatttattcaaaaaaagtcaaggagagggcaataaacgattatgggcacaggtaaagcttttagtgctgcaaatagttgagtgaccgagtattttaattttggttaaaattaaattaattgatctaattcagttaatcagttggttaataaatttaagttaaaagattttttaaaattttgattaatgatttattcggtttaaaattaaataattagttgaacttaataaattatattaatattatatatattaggctattactagttctgtaaattcggttaataattaattttttaaaaataattttaatttaattattagttaaaggattaaaaatttgattaatactaagtcaattagattaactcctcgtttgaacaccctatatgcagatacgatctccaaaattttggtaaagtgaaacaaccagaaacaggcgctgagaaagaaaccatgtctcaagaagatcaagaggaagaagttgggaaactggccgttcgcctagccaacgccgtgatacttccaatggtcttgaaatcagccttggagctgaacataattgacacaattttagccgctggtgacggcgcgtttctgtcaccttcccagattgcgagtgcccttccttccaagaatcctgacgcaccagtgctactagatcgaatgctacgcctgttggccagccattccattctcaaatgctcagtaaaagcaaaggaaaaagaagaaattgaaagactgtacggtgcaggcccactatgcaagttccttgttaagaatcaagatggagggtcgattgcacctctccttgtgttgcaccatgaccaagtcttcatgcaaagctggtaccatttaaatgatgctatactagaaggagggtttccttttagtaaggcatacgggatgacagcatttgaatatccaggaactgatcaacgattcaatagagtatttaaccaggcaatgtcaaatcatactgctttgataatgagggagattgttgatgtttacaaagggtttgatgggttgaaagtgttggttgatgtgggtggtgggattggggttgctctcagttttattacttcaaagtatcctcaaatcaagggcatcaactttgatctgcctcatgttttggctgatgcacccacttattcaggttctataccaatcactcccttttatctcttgaacagatttctctgaaatctatatgaaattatgggatacttgttagtccaatctgatatgagtatgtgttaatttaaagcattgccatcgctgggaaatgctttttgttgtgctgttttctctttacatgccttaacagtaagcacttgaaaccacaagcaaactacagaacaatatcattttctttcttgtttaagtctatctaattctatctgctattaatttatgataaacgaattcatctcaaattatgttctgcagggtagttggcaaagatgagtaaacccacattgctaagaaatgaacaagttaaaatgtttatacatgatgttcgtttattgattttcatgtctagctcatctaaagagggagatatatatttgaggataagcactttggtttgagtttagtggtgtaattattttttttatattataattattatattcaggggaagggaggggcagggctctaggctctagccttcaaaatggaaaattgctaatctctcaaaaattataaaattttaagttaatatgtggtaaagttataatttgctcccaaaatgttagaatttcaatctaatcctttcaaaacctatcaaaatataaaccaatacagtgataaaattacattttaacttttatgaaaatatataacttaattttaaccactctaaaaaatgttctacctttacaaatataattttaccaaaagtaattgcatacatgaataattacattgccaaaactgcatgcatgaataattacgttaaggtaatattctattaacagggttaacctttttgaaaagatgtgaaataacacatcttttgccgaataaaaagtgtttgttcttgaacagatcccttttttgtggcttatacccaaaaaaaaaaaaaaaacatattgatataccttttgctactctgctctattgttttgacttgttgtatcttagagggaaacttatagcattaaagaaagtgattacgcatcttgttttaaatttttctttcttacctcacatattttttctaacaatataggtgttgagcatgttggcggggatatgtttgaaagtgttccaaaaggtgatgctattttcttaaaggtaagcctttatgtcctatagcttagtgaatggagaacttctttttttctatcttcttatcataattgataaatgtagaagttgtgaaatctatttagcttagtaactttatgaaacttgcagtggatactccgtggttggagtgatgaacattgcttgaagcttctcaataactgttgggaagctgtccctgaactgttgggaagctgtccctaatggtgggaaagtgattattgtggaatccatcttacccgaggttcccgataccagtgtttcttctaacattgtctgtgaacaagatctgtttatgttagctcaaatcccggggggcaaagagagaaccctaaaggaatatgaggccttagctttaaaaacaggtttctctggctgtgaagtaatctgctgtgcttataacagctgggtcatgcaaatggagaaaagggcaatttattgaagttctattggaaacttctatttcctttcatctacccccacaggaggattcaacataatgtttacttttcataatgtttgataatattcttggggtttattcaaatttacgttccgttgataatacttttaagttctgctagtgatgatgatgatgatgatgaaaagaaacttctaaaatgatcccgagacatgcatatttatttgtattatgaaatttctacaaagaaaaaaaaaacgaactgtacttattatgttaaataataacaaaattaatgctcaaggtttgatttggttattactttttatacttatttttcgctatttatctttttacttcttgaaatattgtagttccatatggcaaaaacatgataattgttgcagctggtgtggttgacgtttgggcaccaaaaggggctgagagaggaccccgaggggcctacggacttcttgagactttttggtgagaggaatgattactctcgtagtatttgagagagtcgagccttgaaagtgcaagaggcgtgtgatcttggtgcaatggagggcttgtctcgtggtttgcatgcagctacggtttacaggcaccttggactcctttcttgaacttgcaagaggggcatttggtggcaacttgagaaccaggtgttgcgctcccattggagggttagaaagtggcaagtgttgtgctcttataggaggcttgggaggtggccagcgggtacataaggtgccttcttaagccttgaagtagacgatctctccttggtgtgggcattctttgcttcataggctgcttctgatgaggcatggatcatcttatgggctgctagtgttttatttcccaacattcacaacccctttagttgaggaatgtgtaatttttctcgggctttggttggcttgatcttgattgcttaaggctcgttccctctttgaaggtaacgtcagtggctacgttggtagatgtcttcatacttagtgatttatcttgcgcgtttctcatgtgcctcattctaagtcgatttgaggtatagtgattttcttttattgagagcaccaattcttttgattggagtttgattgcttttctaagagggttttgtttcttgttacgtattataaatataatacttaaaatattgaattaagtatattagaattgactcgcacatccccgaagtattcctagtaataccatatttcctccaaacaagcagttggcatttatagtacatagaaacacctgtgttcatgagattatattaagttcatgccttggaccatagattaaaaatgcatggatttatgatcctacttacatttgttattgaaagggaagttattagctttcagataggcagtagagatttcactaaagttaccaaactcgaacggtgtcaatatcaaatgcaaaagctattgcatacatacaaagtgttagcaaaatatattacttgcaagagtacaccaaattatcatttggttgaaagtagattatacgccacgatcaaagggagatgttgatgcatatggtagatcatctttcagcataatcacaacaacaaagaaatgaaggtatttagatattggatctcaggtcttctgagtacaatagactgttccaagacgggttccgtagaagaaaagtgtcctgaaaagagcaaatgaaacatatgatcgaatgtgcagtaaagacttctgaaccatgacataaacaagcaccagcactattcgagaacgaaacaattcaaagcaatatatatttcctcagtagaatggttcacaaattatgatgtcaaagcatatccaaaggcacctaattatcccaaggattagataattccagcttcaaactgaattctctcacatttcctcatcaagaaaggaacacatgtactttgtagcagaaaagagtccccgatttaacaacttagggaaacctatttgtaaaaggaaactctcgaagaagattagttacaaatgaaaaaccaattactaaaggaactgcatcatccaaagaagcacaaaattgttgacagaagagtgagccaacgtcacttttttgcagacaccaggaagctcacaacactaaatgcatcgtaagacttgctaaccctgttcttcgagtaaaagaatcatggaccaatcacttgagttaaataataagacttgccaatccggcttcaaaaatagcagggttttaccctgtagtttaactccagaagtgtaattgatgttaaacataaatgactgtcattaacaataccacttctcgaagtagaataacaaccctgttcttttactcaagcctgggatacattatccactttgtctaagaagcaaaagagaccattgcatacaatcatatggtatttaagtatgaaagaggatcatgatctagccaccacatagataagattttgctatacagaaccccctttacctagatttcagcttcaattagtcatttgatttgatttgatcagaagacaacctaaggtaacataaaaatgctattgctaaagcctatgaccgaaattgaataatttcttgaagaaagcttttggatgtaaaatggtaattggtttgcatcactcgcttggttcaaatgaaaagggtacttcatgtctgttctaccctcaataaaaactaattttttcagggttcgtaactgtcctcccaataacaatgctatgtccaggttccaacctgagttctctatgaaattatttaataattgagcgagctaccattaatcaagtataagtcagagttcctaaatcatacaaatacagtgagatcaggcaaaaatttcaaggttcctaaaagatttgacaaacccaggagggaaagtcaacaatcaaacaaaagccatgaaatgaaagagagagaaagggagagaggggactaacggagacataagagcaagaagggataatagtcaaagagtgagagttggcatgatggaaggcagcaacacagagatgagaagccaatcccatgcctcgcttggatgaagggacaaaagtgtggatgatgtccatcactttgccatcatgtcttaacacgtattctatgtaggctttcttgtcttcagtctcgaacctcctttgggtctcgttccacactatcttaggcgcctccggggaggctccggttgcactgctcgctggcatatctcgccaagtgttcttctgatatgtttaggcaatgctttgtcggaaggaaggatcgaataacgagatctcgggcatttcatttggtcttatattacgcgcgtagataccagactgccccttaggtccaagttgggacttgttctatcccatgccactgggttaccatggttacggtagatttttagagattaattttttttaaattaattaattttaaacttttggaaaaaaaattaattttaaaattttaaaattaataactaaatggattaatcaataattcttttcattttattttttaaaagaaataattaaaacaaaagaaaacatcataaattcaagctagaataataggagaacaaaacactaaatccaagtaaacagactttattccgtacacttaatccaacgttcccttactacattggcacatgaagcaccaccatcaacatcaagaacaagcctaatagactccaaaatattaaaccacttaacattttgatcatacaataaagttacttgttctaaactatgagccgttttatcttctcacctaagaaaaagttaaattactaaagtgcatcttaagaagcaaaatatcctagtttatagcccaaattcagtaccatcaatagaaacaccaaatagagcattaatcacctgtaacaagtccaactccacaatgattgaaccaaaggtaaagccacggtgttaagagaaagcctctcatatagcaaaagcctctattagttgagaggccaacaaagaatcattatgacccgacagggttttcacaaacttccctttctagcagcgaaggtcgtagcattcttctgaacaaaacaagcaacgacgatgtcccctcaagtggcctttcctattaaggtagggattatacctcagtggggattttgtctccatactctaacgaggctaacatatcgtgagtcattgcctgatgggcttgattcatggagttaagagcaccttagttggtggatctgtaagactcaaatgagaggtgttggtataaggcatatgaataattgtggagtccacctacatgcgaaaagacttcaacccccacctcgaggcttataacccacctacttggaaccatggtagcatttaaaccttaggtttagggaaccatatggtaccatttttgtagataagtgggttataaacctcaagttggtggttcaaatcccttcgcacgcattcatatgccctatacaaacacttctctctatatgacctaggtgatacattgcatggatgaaaattgaactgaggattgaaatttcttaccacttatatttctttgaacataaatgtatattagcgtatttattttgatggataactatacttaacattctttgatttgtttgccttgtaatttattgaactaacttatctaactttagaaatcatgagtgagttacctatcatactagaattacatgtttagctacaccatcttgtttatattactttgatccaattttgtgtacaaagcatgctcgagtactttatttttcgtgtgtgttttattgttttcttttgtttttatcttgtttgcttgaggacaagcaacaacttaagtgtgggggtatttgacccgccacaaattatagtgtcagtttaggtacttttcagcatttaacccctctaatatacaaatctaactattgaatctccccgaggccgatatatgttgttctctgcgtcaaaattcctttcttcactattggaatcgttctgaaacatcttagaaactatcaaattcatggcggagccgtcgttgtcttcttcttcttttttttttttgaatttcttggtttcctttttttttttttggttgttgcttgatgataaatgattgttgatatctgggattacgtgaatttgagagatagtgatgggtggagcaatggaaggtaagggtggataggttgtgggtgtcggtgaagtcgaaagtgggttgaatggagagcatgttatcggagaatttaaaattctattatttatcattactctgcatttcgttttgggggagagtaataggttgtttaaatggtgcgttttgtcttttagttaaatggtgagtttaatcttttaataaacggggcgttttgtagttggttgccaattgtctactaatagctattgtcatcacctaaataactatttctttcgttttctcttttaagctggtgaaaaagaggaccaattatgcatattttgggtggaaatttgaattatgtttcttctctttgctctattttttttttcttctctatcttgttcttttgttttttggattcaactgtatcagagcaatggtggtcatgggttagtgatgagaatgtcagtttgagagttgatggatatgctggtcaaagggctagtgggattatgatggtgatgatagtagtggtaagggtgagtggatgaagctaatgatgttgccatggggtttaatagggatgagattataagcggttgttggcatttgaggtaattttttaatttattaaaaataaaataaagtaaaagggaaaaaatggttaaaaattttaaattacgtggcaatgatgtggaagccacatcagcatttaacgacacaatttgtgccatgtctaacttttaatacacctttaatgacgattaacgacgcagtgatcaaatagttataaattgataacattagtgaccaaattaacaattgaaacatcagttaccaagacataaacttaaataaacataaatgatagtttttgtagtttacccaatttttaaagttataaattgtgttttaaatttttaaaagaaattattagatttcttatcatcccaaaaaacaacaatttaactttttatttagtttttcattttttaatttctaaaatatactaatattttatttataatatattaaattatatatattataattttaaacattttaaaaataatttttaaatgatcacatcatcattaatcacatggcagtgtcataaaatgtcatttgtcttaaatttaccgacgttaaaaaaaaagctaaaaataaagaagaaaaaaataatttaggtactaaattaagagaaaatatcaaatttagactcaaaatacatacttaatcctttgaagaaaatggaggtagctgcttataagaaaaatgtgagaaagaggtaaaagtagcgttgaaaaccgtgcagtggatggagcctagtaaatttgtgcatgaaattatcttccaccataaaagcatgtaaggaacgacgtgggcactctcattgcccatcaccaccactcgcaccacatccacatctccttccttttataagcgcaatctgaaatctgaaccattaatctaaaaacaaaaggaatataaggttttgaaaccaaatatatacttttctccccatcacaaacatatctcagaaattttaatcaatggctcaaacaatgctggtaatgtcaagtaccagcgtttcaaccagccatgttgtgaacttgaagagagatcaccctttactccattttcaagctcaagggttaaagcctaaaccctcctctcatttcttattcaatccacactctaacactgttgctgcttcatcatctaaagctt

SEQ ID NO: 109 - DNA, 20 bp, artificial
  synthetic oligonucleotide
cacgggaaactcctacgaaa

SEQ ID NO: 110 - DNA, 20 bp, artificial
  synthetic oligonucleotide
cgagtcacaaaagcccaaat

SEQ ID NO: 111 - DNA, 20 bp, artificial
  synthetic oligonucleotide
cccccttcctcaaaaagatt

SEQ ID NO: 112 - DNA, 20 bp, Artificial
  synthetic oligonucleotide
atcagattttgggcgttttg

SEQ ID NO: 113 - DNA, 815 bp, Gossypium hirsutum
gcccatagtgggggtttaatgggacattttggagtggccaaaacactagatatcttgcaagaacactttcattggccacatatgaagaaggatgtggaaaaggtatgttccaagtgcattacatgcaaacaagcaaaatctaaggtaatgcctcatggcctttacactcctctaccgattcctacttcaccttgggtagatttatccatggattttattttaggttttcctcgaactaagaaaggaagagatagtatatttgttgttgttgacaggttttcaaagatgacacattttgtttcttgtcacaaaacagatgatgctacacatgtggcagacttattctttaaagaggtggtaagacttcatggcatccctaaaacaattgtttctgatacagatgtcaaattccttagccacttttggaagatattgtggggtaagcttggtactaaattactttattctactacatgtcacccccaaactgatggtcaaactgaagtagttaatcgagtcttagggactttattacgagctgttgtgggaaaggacattagaaattgggaagaatgcctaccatttgttgaatttgcatataatagatctattcattctacaactggttattctccatttgaacttgtttatggctttaacccactaacagtacttgatcttgcgccactccctcttgaacacattataaatttagatggcgaatagaaagctgagttggtgaaatccctacatgagaaggctaggcaacgaatagccaaaacaaatgatgtaaacaccaacaaagcaaacaaggg

SEQ ID NO: 114 - DNA, 20 bp, Artificial
  synthetic polynucleotide
gcccatagtgggggtttaat

SEQ ID NO: 115 - DNA, 20 bp, Artificial
  synthetic polynucleotide
cccttgtttgctttgttggt

SEQ ID NO: 116 - DNA, 1066 bp, Gossypium hirsutum
ttcgacatgggatgagttgaaacagattatgcgtaaaaggtttattccacctcactactatagagaaattaaaacaaagttgagaagacttatccaaggtagtaggacggtggatgaatattttaaagagatggagatgctcattcagagagctaatgtggaggaagatgaagaaacaactatggttcgattcattgatggtttgaacaggccgatagctaatacattaaggctacaaacttacattgatttggaagaagcagttcacaaagccattgagatcgagcaacaattaaaggaacaaaggtttgggtccttctctacttcacaatattatcgaggtaacaattccaattctgattttaagagttcaaaaccaccttttgttactaacaagtcttctttgagtaatggaagtaaacaatcagattggaagaaaggggctcctgctaaaatgcaaacaccttctaagcagcccaatttaggtgattcgagtgcgaagaggactcgtgagattgaatgctttaagtgcaaagggcgtggtcattatagtagagaatgccctaacacgagattacttcttctaaaagataacggtgagtacacgtccgactctgataatacagatccagatatgccagaacttgtggatgacagtgataatggcgacgagttggtcaaaccaccaaaggaaggggactttgctaactttcaatgccttgtagttcgtcgaacccttaacattcagatgaaagatgatgatagccaaagggccaatattttccattctcggtgttttattaaaggtaacttatgttcactcattattgatagtggtagttgctcaaatgtggtgagtagctatttggttgattctttaaagttaccttgcaccaaacaccctaagccatatcaccttcagtggcttaatgaatgttccgaagttaaagttacgaaacagtccttggtcacttttaaactcggcaattatgaggatgaagtatggtgtgatgtagtcccaatgcatgcggcacacttgctccttggacgaccttggcaatttgat

SEQ ID NO: 117 - DNA, 20 bp, Artificial
  synthetic polynucleotide
ttcgacatgggatgagttga

SEQ ID NO: 118 - DNA, 20 bp, Artificial
  synthetic polynucleotide
atcaaattgccaaggtcgtc

SEQ ID NO: 119 - DNA, 1520 bp, Gossypium hirsutum
tggttggtcacatcaaggaagcttggaccaactcaaaaagcaatccgtgcactttaatacgagctgaattaacttccatttcagctcaatgagctcgaattagctcaacttcagctcaaaccttttcaattcagcttaatatcaactagacattaatttaatagctgaatatttatttaagtcgatttaattagtttatttcagcttattaatatgtttgttgcatgtttttaatatgtcaagttttattacatgattttaagttgctttaaagctgccgaatttaatgagctgattttagtgatatagttgaccgaattaatgtttcatggttttaatattaattttgttaagctaaatatcatattaattttagttcttcttatttatataggttggccgaatgtgtgggatcatttaacaaggttagccgaatttgaagattcattttagcaaggtgcatgcatgttagatacattgcacctggagatacatgcatcaaattggtgagctgaattcaacattcctaggtgactattcggccaagggagctaatgtttccaactccaaaactgcccattaattcctttcacatttgctggatgcatcttggcttttcggttccatgtgttcacactccatgactcttcaacgttgagttttcacacttgaattggctgctcattatcctcttaattgctggtcacctttcagccaaaagttacaacataaatgagctaatttatgcccattggccgaacctagctatccatgcatcatctaagtttttctaagtccaatgcttcatctagaaggtgtctaatggagctccatgttcagccgaatctagctagttcatttaagtgattcatttgcttaatttttaaggaatgtaagtgaccattcggctagcttaggtgttgcttataaatagctgaaattttactttgtaaagaacttttgacatttttaattagcgaattgctgccaaaattgtgaggcattttctctcaaatttcgttcgagacccgtaagacttatctaagcttttagtggcatctttccgagtcttttccgaacttatcactccttaaacccgagtgtggcgttcacctttgatacctttggttcatactttcctaagtatcgggtcaaggtccttttcaaccatttccaattcatttaggtcctataagtttcgggtcgacacttttctttagtgttggttcattcttgacctctttgaaccattaccaattcgtaccaaataccataccatttcataccaattccataccatttcgtaccaattcccaaataccaaaacgtagcaaaaccaaataccatttcttaattatcttaaaccgaactcttccattctattcataccatttcgacttaaaccaaatccacatccaactttgcacaaacttatcttacttctttgtacacaaatatattctaactcctcgtctaatctacttcttcgtttacgatcgggaaccaaacgactcggactc

SEQ ID NO: 120 - DNA, 20 bp, Artificial
  synthetic polynucleotide
tggttggtcacatcaaggaa

SEQ ID NO: 121 - DNA, 20 bp, Artificial
  synthetic polynucleotide
gagtccgagtcgtttggttc

SEQ ID NO: 122 - DNA, 3220 bp, Gossypium hirsutum
gtaaaccgccatcggaattatgaaggtgagatttcgacatgggatgagttgaaacagattatgtgtaaaaggtttattccacctcactattatagagaaattaaaacaaagctgagaagacttatccaaggtagtaggacggtggatgaatattttaaagagatggagatgctcattcagagagctaacatggaggaggatgaagaaacaactatggttcgattcattgatggtttgaacaggccgatagctaatacattgaggctacaaacttatattgatttggaagaagcagttcacaaagccattgagatcgagcaacaattaaaggaacaaaggtttgggtcattctctacttcacaatattaccgaggtaacaattccaattctgattttaagagttcaaaaccaccttttgttactaataagtcttctttgagtaacaagcagttagattggaaaaaaggggctcctgctaaaacgcaaacaccttctaagtagcccaatttaggtgattcgagtgtgaagaggactcgtgaggttgaatgttttaagtgcaaagggcgtggtcattatagtagggaatgccctaacacgagattccttcttctaaaagataatggtgagtatacttccgactctgataaaacagatccagatatgccagaacttgttgatgacagtgataatggcgaagagttggttgaaccactcagagaaggagactttgctaattttcaatgccttgtagttcgtcgaacccttaacattcagatgaaagatgatgatagccaaagggccaatattttccattctcggtgttttattaaaggtaacttattgatgtgatccggctcggttgattgagtcgattcacttgattgcccgatcgtcgacgagaagtttgttcgattttgtagatagatggagttagatgatttttttatagcggaagctgagaaaatgggttcaaaagatggtttggatagatgtttgataggttcggtgaaataaggaaatattgtttataatttaatagttaaaatggaatggaaaaatagaactcaagcgaagaacgattcaatactatatgaagtattgccccgggacttatattgctcaaggtggattatatggattgtcgaagatggaccttgacccgttacctatagagaggtaggaatcaaaggtttaaaaaggtggatgaacgccacaccaggatggtgataagttcaagaagtcgggttgacgccactagcgagctagataagtcagacgagactcaaacgaaatcaggttggaggtaacctcacaataagtttaataatcagaaatgtctgtaaccttttacaataaacaagtaagctatttataagcctaaaatgcctattgatattcggcatctatgttgttcacattaacttaaatcctgttcacataggtatttaacatgttcacacaaaaagcattaaaattcggttcatgcttgaaaatggtacatgaattggccgaaccatcatgatgcttcacttgatgcattcatgcatccttagccttgaaggatctccataattccgtgaatgtgcagccctttaatgatcctacatctcccctggctgaatgaggcattaatctgcctaaaatacttgaatggtcatcttgaaaatgcatgaatcatgcatgaaacgtcccatgtgttttcccccataaatatgatccatgaatcttcaaatacatgaactttcagcaactccctcttgcatgaacgtcccaaatgcatgtgctcctttaaatgccatccattgaacctcaattgtgcatgcacactcccatacattgcaccaatccattcatgaacctgaagacaaattaaatggtttatttcagtaaaataaatgcaagctaaagaaagctaaaaataagctcattgggttgaggttgagctgaattcaactcgaatgtgctgactcgagctcgagtgagctggaaacgagctaaatggagctcaatgagaaggaattgaactaattcagctcgcatgggtttgcaagcaatggttagggagctggtcaaaaagtgtgcccgaggcgtggtcgtatcacttatgttcactcattattgatagtggtagttgctcaaatgtggtgagtagctatttggttgattctttaaagttaccttgcaccaaacaccctaagccatatcaccttcagtggcttaatgaatgttccgaagttaaagttacgaaacagtccttggtcacttttaaactcgataattatgaagatgaagtatggtgtgacgtagtcccaatgcatgcggcacatttgctccttggacgaccttggcaatttgatcgcgatgttacacaccaaggtaaacttaatcgatactcccttgtatttaaaggtaagaaattcacttttgctcctttaaatcctactgatgtatataaagatcaattgaggatgataaaattttgtgagggggtaagggagaaagagcaagtacaaaagacagagagaaaagaggctaatagtagtggaaaaagtcaaaatttaaaaagcccaaaggtgagtgaatcctctagtggtaaaatgagcgaaaaaaatcttttggcaacaaaaaaagatgtgaagagagccctacttaataaacagccttgtatccttgtgaggtttaggcaaaattatttatctttatctaacattaacgaaaattttcctagtgtgtttcaatctcttttgcaggattatgaggatgtttttagtgaggcccctaaaggtttaccacctttacgagggatagaacatcaaattgacttaatacccggagcttcaatcccaaatagaccagcctatagatgcaatcctgaggagacaaaggaattgcaaaggcaagttgaggacttactagacaaagggtacattcgtgagagcctaagtctttgcgctgttcctgtcttattggtgccaaagaaagatggtacgttttgtatgtgtgttgattgtcgcccaatcaacaagataacggtaaagtatcgacacccaatccctagacttgatgatatgcttgatgaattacatggttcaataatatttacaaaaattgatttaaaaagcggttatcatcaaatttgaatgagggaaggggatgaatggaaaacagcttttaaaacaaaatttggattgtatgaatggttagttatgcctttcggcct

SEQ ID NO: 123 - DNA, 24 bp, Artificial
  synthetic polynucleotide
gtaaaccgccatcggaattatgaa

SEQ ID NO: 124 - DNA, 24 bp, Artificial
  synthetic polynucleotide
aggccgaaaggcataactaaccat

1-19. (canceled)

20. An isolated polynucleotide comprising a nucleic acid sequence having at least 70% sequence identity with SEQ ID NO:94, or fragment thereof, wherein the polynucleotide confers an ability to the polynucleotide to be transmitted through mitosis or meiosis in a plant cell with a transmission efficiency greater than 50%.

21-26. (canceled)

27. A recombinant DNA construct comprising the polynucleotide of claim 20.

28. (canceled)

29. The polynucleotide of claim 20, wherein the nucleic acid sequence having at least 70% sequence identity to the polynucleotide is selected from the group consisting of SEQ ID NO: 95, 96, 97, 113, 116, 119 and 122.

30. The polynucleotide of claim 20, wherein the polynucleotide consists of a nucleic acid sequence of SEQ ID NO:97.

31. A plant cell comprising the recombinant DNA construct of claim 27.

32-37. (canceled)

38. A material comprising cotton produced by a plant comprising a plant cell of claim of claim 31.

39. (canceled)

40. An isolated polynucleotide comprising a copy of a nucleic acid sequence having at least 70% sequence identity to SEQ ID NO:95, or a fragment thereof and two copies of a nucleic acid sequence having at least 70% sequence identity to SEQ ID NO:96, or a fragment thereof, wherein a first copy is located 5′ of SEQ ID NO:95, and the second copy of SEQ ID NO:96 is located 3′ of SEQ ID NO:95, wherein the polynucleotide confers an ability to the polynucleotide to be transmitted through mitosis or meiosis in a plant cell with a transmission efficiency greater than 50%.

41-50. (canceled)

51. A recombinant DNA construct comprising the polynucleotide of claim 40.

52. (canceled)

53. A plant cell comprising the DNA construct of claim 51.

54-59. (canceled)

60. A material comprising cotton produced by a plant comprising a plant cell of claim of claim 55.

61. (canceled)

62. A polynucleotide comprising a structure comprising a core sequence flanked by two retroelement-related sequences, wherein the polynucleotide confers an ability to the polynucleotide to be transmitted through mitosis or meiosis in a plant cell with a transmission efficiency greater than 50%.

63. The polynucleotide of claim 62, wherein the retroelement-related sequences are at least 90% identical to each other.

64. (canceled)

65. The polynucleotide of claim 62, wherein at least one of the two retroelement-related sequences has at least 70% sequence identity with SEQ ID NO:96.

66-69. (canceled)

70. The polynucleotide of claim 62, wherein the core sequence has at least 70% sequence identity to SEQ ID NO:95.

71-75. (canceled)

76. A recombinant DNA construct comprising the polynucleotide of claim 62.

77. (canceled)

78. A plant cell comprising the recombinant DNA construct of claim 76.

79-84. (canceled)

85. A material comprising cotton produced by a plant comprising a plant cell of claim of claim 78.

86-117. (canceled)

118. A method for identifying a centromere sequence in a plant, comprising:
(a). obtaining genomic DNA sequences for at least a portion of the plant's genome;
(b). assembling the DNA sequences into low-stringency contigs;
(c). selecting those contigs having deep reads;
(d). analyzing the deep read contigs for the presence of tandem repeats;
(e). eliminating those contigs having tandem repeats from the contigs having deep reads;
(f). determining a consensus sequence for each remaining contig having a deep read;
(g). designing and making a nucleic acid probe based on the consensus sequence;
(h). using the probe in an assay to detect centromere sequences.

119-120. (canceled)

121. A centromere sequence identified by the method of claim 118.

122. A minichromosome made by the method of claim 118.
